United States Patent Application Publication US 2021/0254182 A1 - sequence listing, part 2

SEQ ID NO: 91 - DNA, 7609242 bp, Phytopthora sojae (residues 1,902,312-3,804,622 of 7,609,242)
  misc_feature (40911)..(42413): n is a, c, g, or t
  misc_feature (44154)..(44253): n is a, c, g, or t
  misc_feature (1018625)..(1034984): n is a, c, g, or t
  misc_feature (1036211)..(1039539): n is a, c, g, or t
  misc_feature (1043630)..(1045157): n is a, c, g, or t
  misc_feature (1052050)..(1052243): n is a, c, g, or t
  misc_feature (1057205)..(1060318): n is a, c, g, or t
  misc_feature (1068672)..(1069727): n is a, c, g, or t
  misc_feature (1070516)..(1074243): n is a, c, g, or t
  misc_feature (1086719)..(1089539): n is a, c, g, or t
  misc_feature (1136080)..(1137066): n is a, c, g, or t
  misc_feature (1137866)..(1142586): n is a, c, g, or t
  misc_feature (1207052)..(1207151): n is a, c, g, or t
  misc_feature (1318525)..(1319078): n is a, c, g, or t
  misc_feature (1330827)..(1331903): n is a, c, g, or t
  misc_feature (1337551)..(1343863): n is a, c, g, or t
  misc_feature (1346839)..(1359455): n is a, c, g, or t
  misc_feature (1364269)..(1364817): n is a, c, g, or t
  misc_feature (1369478)..(1369597): n is a, c, g, or t
  misc_feature (1373964)..(1373964): n is a, c, g, or t
  misc_feature (1377891)..(1378181): n is a, c, g, or t
  misc_feature (1381005)..(1381104): n is a, c, g, or t
  misc_feature (1716272)..(1716371): n is a, c, g, or t
  misc_feature (1898378)..(1900994): n is a, c, g, or t
  misc_feature (1902632)..(1903384): n is a, c, g, or t
  misc_feature (1923874)..(1924225): n is a, c, g, or t
  misc_feature (2013417)..(2013516): n is a, c, g, or t
  misc_feature (3074820)..(3074919): n is a, c, g, or t
  misc_feature (3655456)..(3655555): n is a, c, g, or t
  misc_feature (4084570)..(4084669): n is a, c, g, or t
  misc_feature (4283405)..(4283504): n is a, c, g, or t
  misc_feature (4298420)..(4309139): n is a, c, g, or t
  misc_feature (4312980)..(4313133): n is a, c, g, or t
  misc_feature (4329460)..(4329559): n is a, c, g, or t
  misc_feature (4361465)..(4361564): n is a, c, g, or t
  misc_feature (4707429)..(4707528): n is a, c, g, or t
  misc_feature (6047486)..(6047954): n is a, c, g, or t
  misc_feature (6710239)..(6710338): n is a, c, g, or t
  misc_feature (7149083)..(7149182): n is a, c, g, or t
aagtacctagtagttgatttcccggcccgatctagacgagcgcgcacttaccacacgctgatcggtggcatggacggcttcagtccacatcgaagcaaagtgttcggaaacgtgtaggctttttggaagtcgcaacgcaggatggtcggtcttcagcgcggaaacaaaaacatatcttgttgactgacgcagtccacggtgatagttgagcggccacttggtatgagctcaacgagatggagatgtagtgaccgaaggtgaacaaacaaaataccgtttgcggtttattcgtagtgtaccatgctcaaacgcatcgacaannnnnnnnnnnnnnnnnnnnnnnnnnnnnnnnnnnnnnnnnnnnnnnnnnnnnnnnnnnnnnnnnnnnnnnnnnnnnnnnnnnnnnnnnnnnnnnnnnnnnnnnnnnnnnnnnnnnnnnnnnnnnnnnnnnnnnnnnnnnnnnnnnnnnnnnnnnnnnnnnnnnnnnnnnnnnnnnnnnnnnnnnnnnnnnnnnnnnnnnnnnnnnnnnnnnnnnnnnnnnnnnnnnnnnnnnnnnnnnnnnnnnnnnnnnnnnnnnnnnnnnnnnnnnnnnnnnnnnnnnnnnnnnnnnnnnnnnnnnnnnnnnnnnnnnnnnnnnnnnnnnnnnnnnnnnnnnnnnnnnnnnnnnnnnnnnnnnnnnnnnnnnnnnnnnnnnnnnnnnnnnnnnnnnnnnnnnnnnnnnnnnnnnnnnnnnnnnnnnnnnnnnnnnnnnnnnnnnnnnnnnnnnnnnnnnnnnnnnnnnnnnnnnnnnnnnnnnnnnnnnnnnnnnnnnnnnnnnnnnnnnnnnnnnnnnnnnnnnnnnnnnnnnnnnnnnnnnnnnnnnnnnnnnnnnnnnnnnnnnnnnnnnnnnnnnnnnnnnnnnnnnnnnnnnnnnnnnnnnnnnnnnnnnnnnnnnnnnnnnnnnnnnnnnnnnnnnnnnnnnnnnnnnnnnnnnnnnnnnnnnnnnnnnnnnnnnnnnnnnnnnnnnnnnnnnnnnnnnnnnnnnnnnnnnnnnnnnnnnnnnnnnnnnnnnnnnnnnnnnnnnnnnnnnnnnngcagttcgtgtaaacatctcgttgatgatgatattataccgtgttgcagcaacttgcgtatgctcataacagcaaatactgttcgtactggtgcacgcatttatttcatattgcgcaaaaaatacgatgcccaggcaattatttcagatagaataccagtggttatttgggctttcttagccctgatcgttagcaaatagcttcgcgaactacttggaaaaagagctacgaaacagcgggttacagttatgcaattgtaaatattgcgatatggtgactactactagtatattgacgactcatagagtaacggatgtccacctgcaaacattgtgtgcgccgcaaggctttcggttcatattagtttagtatgttggctcccaacggtacttagttctcgcaagtctcttaccgcggcaactctgctcagttgtgaaggggggaatcatatcaacgcatacttaattacttaggtagactacagccttcgccgtggtgtctttctctttcacatcgactcgcggcttacgcaacgagatattgcaacacagatctgaacgtgtgtttttaacgttttctcgtgtcaccactgggcggcagtcgcgccgtgtcagccctacaatgcccgatcccaaaaccgatccaagcaaaacatgatcatattcaatccggctcttgctgctgataccgcaaaaaaacaccccaatgcaaatcgtggttttatcatggccatactttgtctggcagctgggcggggacggaggtcacccacgccaaatctccaaagttccacgagtgctctagtaaacggaacggcctgaaggccgcacgaaatatcattaagtgaagttgggctcgttagaaagccaaagggcaaggctggctcatcgtagagcccaggcttgccaatagttaagggggccccaggttcggtaggggcgaatttgtgaaaccctggaaatcgctttcaccccccccccccccctcctccggctggtaaccctaacctgcattgagacacatagacaaccatgcaactcagtgagttctgctcatccagtccggaggtaaccgcgcagaacacgttggtttgcatcactttccaatttcctttcttccgccaaagcatctccgacgagttactgccatgcgtctgctgctctggatcttcctcgcgacgctgatcacgctgctatcgagcgtcggggcagactcgacccgggtaaccaactccgctacgaccgattccgagccggctttcgcgctgagtgctacctacaacgccaacaagaagaaaaacctgcggctcgacgagaaggagggcgatgccgacgttgacgactacggcgatggagagagaggtgtctctacatcaagcctcaagaatcaccttggcaagctcaaaaccaccttaaccacgaagctgcgtgatatcttcggggcgggattcacgaggatcatgtacaggcaaggggaaactccgatcagtgtcagggcgaagaagatgggggaaaagagttttttgcccgggatgttcaagacacggtatgaacaaaacaaagcaaaagaagctgcaaaaataacttcctaaaaccgagtgtgggtagtgcaggcagatactgtaacaagggcggtgtttgccgtcgaatcccatcttttttctttgcaaaaagagcagaaggcatgccctaagggcaggtaaaaacgtccaacgtttccaacgttggtgtgtgttttccgtttttactctaacgttttttaccgtctttactgttaggtacttggcgtaattacttgcaaaagatgtgacttggtttcgctattgcgaccccgatcttcgaccatctccagcggtgccctattcggaggattgctgtaatttgggctcgcgctacaggtacagatcccgccgaccgaggtggccgcgctcgtggagctctaccacaacccggagcagtgggtcggcgtcgaagtggccatggccacgtcgtggcgctcgagctgccggccaacgagttgagggggtgtctgcccgctgccagcctcgcgcgcctgccgcaactccgcgtgctcgacctgtccaagcaccagctgcgcggcgagatcccggccgagctggggacgctcgccgacctcaagcgccttgacttgagctgcaacgacctctcgggcgccatcccgcgccagatcggcgactgcgagcagctgcaggagctcaatgtgtaccagaactcgctgtccgggacgacccccaagaaactggtcaagccccagagtctgcggacgctgctgttgcagcacaacctctgcggggcgctgctgcccgacgcgctgtgtcaactcacgcagctcacgaagctcagcgtgtgcggcaactgcctcacgggcaaaatcccgacggatattggccgcatgcaggtgatcgtgttcctgtcgctaaggaagaacgagctaacgggcatcatcccgccgtcgctcggctgctgcaaggtgctcgagttccttaacctgtcgagcaaccagctcagcggccccatcgcagagacgctgggcgagcttgaagacctcgaggatctctaactcttcgacaacgcgctggagggctgagtggccgatagcattgctagcctcaagtttcttaaggagtcggacttccgagacaaccgactccgtggagagctgtgcaacttcctggacggctgctacagccttgaatcggtcatgaccaagaaccacgagctgtgtggcatccccaagtgctacaccttctactacgctaatctccggtgccgtccgtgctattaggccgtgcgtgacgtcgagtactgcggccacagcggcgtttaagctgcctcacggtcgcggtataccaggcaacacagggtcgttaactaccagtacgactcatacgaccccaatgtgtacttgacatcaagtgggagaccagctcaccaggcgtacggcaggttatttgaagtgctgattcagcgcgagcggacgcacaagtagcagcgctacttggtccagtgtgtgggtcgccagcacgtgagctgtggttggtgtattgaccgtgacatcacctacaccttccgacataccgctatgcctgcccttcagaggtacttggagttgctgcacggagcagcgaatctgccatggcccaaacccgcacgacaccctacggattggtgctcgctacgaacagcaagggcagccggggttgctgatccagttcgcgactatcaacttgctgagcgcgtacaagagccacttctaccagctcacaactatcaagatgagcgcgtaaagaggcgagaacagcccacagctcgagaacgccgtgaaggacgcgtgctgccgtcgcatgtcgattgtgtgctgggagcggcagacttcaagccgaacaggtgttgacgagtacctacgcgtatctatctaacttatctgcttcgcagctgagctcgcgattgcttggcgttggccccttactttctctcatcatgtgcatcaacaccaacaacacgaaggcacgcttttcatttcgcgtaacttccttgaacgatttcgtgccgtactcgtgactgacgaaattcggccgtggtaggaaagtgaagtatgtttgctccacagttggagtgccaaacctgcgtttcatcacctttgccaccttcttgcacctagtcacaaccacgtccttcgtcaccgtagtacccagcccaccagagagcgcactcatgtcgattgatccatcatgctgtacagcatcgagaagcggcatcacgagcgccattactgacaccaccacagcagcattttgccggtgctgacgcgagtcatcgaaatccagatacactgccatcttggcgcactactggcgtcgattcaaaacagcacagagctcgtcaaacatacccgtgagatcattgaaaagtcgtagcacatctcgcgatagcacacgcgtctggaaaagctccttggagcaagtctgcgtgcgcggcattatacaggacctccatccatggcacaccactcaaaacggacttgtccttcagcatcagcagccggaagatgtttgacacatcgctcaagtggaattgtttcccttgttttagtgctactttcccaactggcggagtttccccacgataaatcgcactcagcgtagaaggtcgaatgttgcggctgtacaggaaggaccggtggtaagcaccgtgggtcgcatgtcgtgacggagtgaaaacacttgcagcacatcgtccaaaacaggaatacgctccagatatccctccttcacaagtgcgttgtacagatggccgagcgcgcaaaatgtcgacgacgacaggataacttcattggccacgtacagatacttcaagtcgtattcgagcatcgaaagccccacgtatatcgggttcgcgcttgccaaatgcttgagttgtctgaattgttttatctccccggagcagcgctccagcatttccttggcttttgtagagagcctcgttcgtttctccaagttggtgtcgatacgttgtgcaagctccacagaatgcttgaacgtaaggctcacgtttcgaccgagccctccgtccccctggagagcagcgaccgatttaatccagcaaatgcacgtgaaaactacggggactgtcacgacgcgcgtggtgaaatacggctccatcatcattaagaacacatccatagggccggaaggtttcacgcctgcggtcttcaaagccaccattgaattgtgcagcagcaccagttgctggatcaggaacgagttgatggcacactgacaggccgcgagggccttgggcagctcttgcagcagctttggcgtgagaaccgacggatctgccgcgatctcctccacgatggcgcagtaagtctgcagctgcacgcggctgtgatgtccgcggccacgtgcacgcagcagccagtccaggaagaagttggtggcgtccttgtaggcgtgggtgtacgcgctcggaggggccgccatctttgtctatcgagggaggcgggggccttgcgagggaatttcgccactgagttgaaccagatgcatcatttgccgacatatattgccataaatgctgacagcatactgctcactatttaaccccaatgctaaaacttatcaatcattagcatcacgataatgtccgccaacgattttcgttacgtactagccgagtgccgccgctacgcggagttgttgtagatgtatctattgctgtagctgcacttttccaggcgaattcacaattcgaatgctcactgtatttgaaatatattatttgacaataataattccgtatataataccattattcttattattggtatttgttaagaaacaaattaaaatggattgaatataaaatcaaaaatatttttcgaggcgataatcaaattgtatccaattatcagtaatattgttcaaacgttgtggcggatcgcgatggcgaccgctctcttcgagatggagcagcgctggagcttcatactgccgtggtgtaaggtgctgcacaagaagatcaagctcaagccgttggagcgcgactgggatgtgtgggcaaaagtaccggctggaggtgagtcttccgatgcgctgccagttcacggaagattccgacggggaggaattcgagctggacatggagtggtcgggcgaggactacttccaggataaattctgccaggtccgcgaggctctggcactcttggcagcagtggctcacgtggaccaactggcctggaagtacctgctgaaggagcactgcggcgtgcgcttggggaaggaggggagtgcgaaactacatgtagaacgggatcttccagctgagtattatctggtattggatcacgagcaagacgaacgcacggcatacgaagaagaccatcttggtctgaatctggtccaattctgtggcaccgaccaccacgagatgcctgtagatgggtatctcgagacgctcgcacaaatcgcagcttttgataccaagctaaagtcttacaaccctggcgtggagattcgaatcccggtgcaatgtgtttatgacggaggaccgcactatctcaaaaacattttgagagcagagaagacgattcatgacatgtggaagagtgtggaaccgcgagaggtgcggtcggaacagctcagatgcatgttcgtgctcaagcctttggttgctgacttggaagacgtgatgacttggccggcgatggtgacgaaaatgggcaaaatgatgacgcgaaacctctgtttctccgaagtgtctctctgtgctgaaaggcatttacgagactttgggagtgaacttgagtcgcggaaggtgtttggtcaactcatggcgcatctctttggcagcactcgacgttctcgagaagtcacgtaccctgatcggttcgggtgcgattccgatcaacaccaactggatttgttgtctctggattgcgatccaacgctgctccctgtggacttacacgcaatggggtcggcgatggtagtcaaccagacaacgagcaatttagtgatgcagctgatgttcccgctcgagccgtatgatgagatgacatttgatcacgaaataactactcacgaatggcggcaatggattgcttacgccttcttctccaagagggctcgtgaatgctcctcactcgagtctcctacactggttaacattcggacgatgtgctttgaaggcatgcaagaggcgttcgcggccatattgaactcagaacacccagaagaagagctgtttgaatgtcctcgcggcagggtggacgaacgggatgcaacgctgaaggcgaatgctccaatccgatgggagttaatggtcgtcgtgaacctgtcgagggctccacagttttcacatttcctacagcaattcaattcgtccgcgctttcagtgacgatggcagcagtgagtgggtgaacgtgataataccaggtttcggaagatgccaagtccagcgtaatgacttggaattctccgaagcgagtcccgctaaaagaaggtctaatggcgtgatatccctcattctcagtttcgagagggatgagcaggcttcttccgacggcgtagcggtctttctccgagccgttgggcctaccctgatattgttgacaattgagaaccccggtccaaggatgaggcttcacgaacgctccatcctttgaagatgcccgaatctggaagagttgtcgctttgcggtggcctagttgatgagcaatttgatctccgtgaagttcacacccaaaaaccaaatatccccaccaacaaagtatccgttggcaccatgtggcggatctttgccacgacttaagccaagcagacaacccttttgtgaaatgtgttcgtcgtctccgtgtgtggttgaacaaggcgtggtggcgatggagtcgccgccggggagactacaacccacctgctttcgcagcagatgtaaacgctcttgtgcccataacaccacaatcgagtactttgaggtgattgttggtaggagacaccaacagtacctcgacagctttaaaaagctgcaccccaagcccatcgatcgttcgctcatattgccgacagaaaacaagctagcatttcttagtgtgctagcgccgagtgcttgccagccaggggcgaacaagaagaccaacaaggcaccatccgctagactctatggtgtggaccggcatgttctgtcccagattttcgcgtttgctgaacctccagcgttacgagaggtgtattttcgctgggatgtcgacgactatgtcgatgaagatgctggaattgccacttttaattgacaataaaatggtattcgctggtgactgtaagagtggaacgcctcagttgaagtttttcttaagtttcatttcttttattgtactttgcaatgattttggcaatatgaggcgagatttgctgtatttatagcgaccacctgctagatttacgaaaaatcgaggtgcatagttgggtggaggcctagaattacgctaaaagcgccacaattgcacttttgaaagtgcaattgtggctaggcagctgcaattctgtcggcttttatccacaagcacctagacacacggcaattatgcataagaggttggatgtgctggggatcatggacgggggggtactgggccaatgcatggctgctgacaggctctcccaagtcgatatatatgtatatatgaggaggtgtatttaggcataattttagcaggtcgtgtatcttttttcacacatatttaggagcaagctttgccatatttagcgtctaaaatggtcggcaaaatcattgcaaagcatctgattgctgagtgaattatcagtgatgatactcaaacatgcgtagcccgaggcaaaagttgttgtgtttggcgtgatagtctacatgctttcttgtactgtgctgctaccgggatggagttaaaccgtgcctacgtttggctatgagcaaagaccgtaaactcattttacggcattttactaatgctgaagtattaacacttacccgctgctattgacgcacggtgtactatgttgtgcgcacctcaagacagtggtaaaaccgcgcattttgagcatggttctggtgctaaaaatagccaattcgcagccgttttcgcgcaacaagctctgcaaaaagtcgtctcgggcgctgtatttttgttttagaacggcgagactggattggttcagtgcacaacacgtgtaaaactgactttatgcgataaaacgtactgaatgcattaacccatctgcttcaatccctatccaatcatagaggctctctacgactataacaacgtcaaagcaaaaattctactagtgaaagtataaagtttcacaataacgtcgatggtgtagttaaaccctaaggtgcctccggcaatgagcttgcctcgacaaagttcgtgaagcacataatgttgtattgtgccatcgaatgctagatcatgttcatccagtaagtgtttgtaagatctattcgttggcgaaggtcgcagtggtcagttcgctctagttttaccgcttttccttgaggaaaatttgcccgcccattagggttcttactcctaaaaagagatgctgtcttaagggcggcaggtagtcgtcaactctcccttgcggccaccacggtggatatgaacgtgttccccttgtattcttcttttattcaagccgcggatggactcaaacgcacaagtattggtggagatatgatgtcctatttcggacgttacaaaattcggtgacttactagccccatcattttctgccactataatactgggcgtggagaggagaaggctataataccacagcaattcaagggcgtttgctcaacagtggcactgttgccgagcgtccacattgcttacttagttttggttttgatcgtcaacattgtttacttcgtttgtgtatggggaggggttgaaacgcgaattgctgggaaaatgtacgagaagctactgcagcagaagttcatcaagctgtacaacaagggcgagacgcccctcaccctacgagcgaagcgcatgggaaccgacaacgaattcgtggccaaatacaaggctttctgggacttcgtccgcaagaacggaaatgtgcccaaaccgcaatgaagtaggacctgaagaacgtgcacctctaaccactgtaggtacttgggtttactatgtagaattcaaggtatagtgcaatgcgcaccggtaatgagactggatattctgacaagaaagcaacattcatcgcactcatgagtttcttcccacagtttttttttcttttcttctcgcatgtgccacaagctttagcatctttcgaaacatgcgtggcaaaacaaacttttgacgtgaatagtgaacatcgagagtcacttgtgcctagattttagtttaaggtgaaatttgtactttgaagtatatttaagctgcgcatgcaagaaaagaaaactgactacctattgtcaataatttgccatgctgtaccgagtgacttattgaatagtttaacccttgcgtgccacatccaactcgattgcgattgagctccgaccgataaaataaagctacttagggtccgccatgtcgaagatcgagttgtttgctgcccttcgaacccgacaaaatagctttcgtgggtgccccaaggtcttttcaaccaaaactcccgatgctcttttcaagtctttgacagtttccaagttccagtgatcttgcagcgtttccagaccttctccacacacctgcgtttttgacagaatacccacaagatgctccgccttcaacgatggcaaacgctgccaggcacacgaatatcatacttcttgccctcaaacaatggcactgagctcaggacaagcaggtggatttgtcgagtttgcatccatgaccataaaacatttctgcaaaactggataaagcggccgtgcgactggaagagcctttcgagatcatcaatcacaataaaaagagggctcacttccttgactagacgcttgacatatcctgacaccgagaatggtcccaattgctgctgtatgcgatctgttccaggctgaagctgctcccccacggcttgtgcaagcgcctggtttgccgtttctatagttatagcatctccagcagacgcaagccgaagaaatattgtccgacactgacacaagtcgcggtgaagcccgaatacttctcgttttccaggaggccaggtctcacggcacttgaaaatatagtttttcgctaaagctgttttacccattccagagccagcaacgactagcggaatctgtaaattgtcaggtttcggcaagttgttcgccccacagtaggataccagatgaattctctgtaatgtcttgacgacttcatcacgaaatacatattgcctttatccagagcgtacacaggatcgagttctggcttccgcatcggctgtataactagtggctcggacgtctggaccagcacgtgcacttctctcggtcttggtagatttacggaatctcggaacttgaattcctcaaggaagtcgctgctccccaattgcgtcgggttgtctactatgctgacaaagcatagcggtaacctcccaacgttgagacttctgatgtctgtgtctgtcacaattggccacgaaccgtcggggttcttcgctaggatcagcttgagctcggcgtctgagcacgcgatggtctgcgaaaacgccgcgtctttgagactgtacccacagcttcctgtcgagacgaaagatagtttctccgccagtgctggtgagcacgcagtggataaggagctcggtctgttccatcatgggtttggtagtctatgaagttgatgcgacgtgaccaaattccgacaaggtgaattctgaaaaatgattctgaagtgctaaaaagtttttttttgtttgcctagcaacaagaatgttgtcactcgcatcaaccctctcgaacgatcccggtacccgaagagacaaacccttctatacgaagggaagttttacaggtctgtaggccatgttgatcaaactgggctcccaggacagtgaacatctggagtacgaccctttgaactcgctccacatcggctttggtagcgcccccgtagacaattcgtatatcgctatcgcacaagaacgcgaaccccttcatttcactgaactgcacgggaatcgaatcaacaagaagcttcaactgagcaagatgttgatttgttgtactggccgctgggctgcattcaaagtacaacggccgaccagccaacgcatcgagagccaactgcaaatcgtagctctccaccacattcgtcagataccattctaggcgtcgaaacgcgtcagcattcgatgtccgaccgagtcccatggcttctcgacgctccgagtaaatttgtgccacctctctaaaagagggctctcgcttgtgaaatggagtcttcagcaagcgcttctccagcacatcgagagtttcgcgagcctgtccatttctctcgacagagacagagatttgagctgcggatacgacaaatttggcaaattccagtgtcgttgcacagagctcgcggacgtcattcagttccggaactgtaatgacggcgtggtcaatacggtagaacttctgcatcaagttgataccgattgacgcttcggtggcaatcacggatcggatatgagggtacgtcgagttgagactgctaggttcggcatgcgacttcacaagccacaccaactccttaatcattccacaagcattctccacgacgtcggctttctcactggcaggaacgttcgtgtctttgagacggttgaaaatcgccgtttccttgcttctcagcatactctcgagctttgtcagactctccgactcgaaactctcgtcgacctcggcaccagctgcatctaggaggcgcaagtagatgcgcgcactttctaccgacctgttattcgaggactttgcagctgtagcgatcattgattcctccttgatggcgccagacaccactttactgttgttgttgttgttgttcttcttcttcttcttcttcttcttcttcttcttcttcttcttcttcttcttggctgttttcctggcacttgcacgcgtactttcattctccacgttgtgctgagcagttgctgcctgacggcgtcgctccgcatcttttgagcgaaacaatgcctcacgcttgcgtacgtctttgatagtaggattaaagaatttcgccgccgatgctgcaatctcacgcgaccatttccgatcggacgttacatcacaaacgcgtctccatcaccgtctttgactcgaaggtcgattccaaacgccttatctaggtcgaatacatcacgatgcccattcttgacggccagatgcgctagagtttccttcgtgtggaacgtttgcgtgttcaagtcggtgaaattatccgtctcgagaagtactcggacaatgtccgcatgccctgcgatcgctgcactatgcacagccatggtattcggtaaaaactgtcggcggcatggtaaatcctgttgccgtggctcttctcgacagtgtctcagccgtccgatttgagctcccatttgcaccatccattccactaactcgacgtcgtgagcagggcctgcggctgcttgatgcaatagcgtagaaagctcattgtacggcttctcggggctcggcatcaccttgcttagtaagtcagtgtcgcgttttagttccgacttgaggtagttcaaatcgcttgtagaaagagggccagcgctctcgctcatcatcttcatcaacttcgcgaacaccttgtcggcatgttcatcctcactctctgttttttcatccagcaacagtttcccatactcttgtgtcgcaaaatctggctgtgacgggaatgtaaagtatttctgctcgcagatttgtggcggggtcgcgaacctggctttgatcactgctgccacctcctgacacatttccttggcgagcaacatatcaagtggaatcgacgtaggcatcttacttggaagcatgctcatgtcaacagatccatggggctacatggcatccatgagcggtatcagcaacttcatgaccgactcttcccgcgcccggttcacacgttgctgacgagattcgccagctattgggattgctacgatctcctggaaatactcttgttgacccaataccttgatcagttcagggaacgtgtccatgagatcttcattcagtttcagtaggtctcgtgatagcactcgcgtgtcaaacagctccttcgagcatacatccgagacagtctccagtatatcttttcacgatccagcgctcagaacggacttgtcgttcagtctcatcagccggaatatcttcgacacatcgctcaagtggaaggccttgcgtttcttgtaggcttcacctccaacagggacatcttccccacggtgcactgcatcgatcgctgaagccctcaagttcgcgctgagtaggtacgtacggtagtagctcccacgactcgctgcagcacgagatggaatgaaaacctcttgatcatatacctccaacacgtcgtcgaaaaacggaatgtggtcgagatatccgtcttgcacgagcgcgttgtaaaggtggccgaacgctcgaaatctcgatgtggcaaacaggacctcgttggcgatgtgcagatactggaagtggtggttcatcatcgtaaggcctgcgaacagtgggttggcgcgtgacagatgttgcatacagaccgattgctttatctccgcagcgcaccgccgtaggagatcgttggctttgttgaaggcaatcacggccttgctgttggctacagcggcatcaatgtttctcagcaaatccttcgagtgcttgaatgtcatactgatgttgcgaccgaggtttgcacacccttgcagtgcagccaccgatttcatccagcaatgcacgcaaataccacagggaccgtcacctctctggtggtgaaaaacttatccatcagcgccacaaacgtatccatcggtgccgggttctcgtatccagaacctgtgaccatccttttctcggcgatgaagttatacagcagcggcatctgttgcagcaggaacaccttgttgttgttggtttccggtagcagcacgtacgttggcgttcggtcctcaccataggcttccccgaacgctccgtcctggaaaatcactcgttgttttgtatcgaacgggatagaagggaggagggcatccaacgtcgtaccaacccccagtagttcaatcagaaacgtaccaggaatgtaattgggcagataaaccccaggcttgctcgtgtcaaatgagcgatcgagctccttcatgatcttggtatggagatccacaatcttcttgcggaaagtcttcagcgaggcattccgcacgatattgaacatatctttggccgaccgaagcgacggataccgcagctgcagacgcgccgtcagtgcactggcagtgtccatggccagcttgaccaccaccgtggccaatttccgccgccgcattgaaagccccatcgggatccggtaccctccctactagataccccacgacgttgacatgcccatttgcagcagcggccaccaaagctggctcaagatcgggacgccggacgaggaaatgacgggtcaggaacgtcactgcatcgaggtggccgtgtctggcaagaagctccgccgccccagatccgagggctgcgtagattgcctgaaggaactcgagcaccagcgtgtggccgttggacgcagctgcgatgaatgcggccttggagcagccttcctctcgctcgtcgtggagccgctcgcgcgggacacgcttttcgtatcgctgtgtctcaagtttgccatcgcggatcacagtgcgatgacgagtgcgaatactatcggagcctgcgagggtagttccacggttcgatatcagcatcttgggctttcgatccgcccagcacaacgtataaatgggtttccgttgtccgtaaaacttgacatgatcttgaacgaaccccgggtcggctgcgtgtcaatccaagttttcatgtggcactttggatattctacgcttgccgtttttacaatgcccataaaatacagaccgagctttttttcgagttgcactagtgttttcaccgaggcaaaagcactatcagccacaacagttctccctgtgcctttgtatttttccgtcaatcgcaacacaaccgaggtaccctccccaaattcactacagtactctttgcgacgttggcgagcggtaccttccattagttcgagtcccagcaacacaccactatctccatctgcgagcgacttcaactctgtcccctttccttcaggtttgcgtgcaattttagtcacatggggaagtccatcgtgagtgtacttagcatcccggcctttccaggcactcatgcactcgtcgactacgataatgtttccaggagaaacatgcttggttctctgatcgttgaatccctgaatcaatggacgtatcgggtaccacgggtcactagtcgagttgttgtcggaaaatgaaagtgcgtacattatttgctcaaaacagtgccgtgtcatctgaaatctctccccgtagttgctcggagtattcacgcaaccttctttgtgttgtgtttcccaatagacccgcagggatccccgtcgtggctccacagccatcgctaaacgaatacctatccagcgaaaaaagtcacctggtccaatagagcgaaatgaacttgccgccaaattattgttggtaagtcgaatagtttcattgagagtgcccatggggtacatgatgtagaagtatttaattaaggacttctccccaaggtgaacgtgcgccggccacagaaatgtagttgatcgcgaggaaaattgacaccccgcgtcaactgagacagaatcacagggtacccacatacggccgtgagcgaccacggtatcgtcgtcttcttcttccgagtggccttcgagtgtttcatcatcgtcactgccgtcgtcttcgccgctagaagaactctcttcctcccaaactacttggcaggcaccctccgtgctgccaggtaccaatgagcccccatcgctggtttggccatctccaccgtggttcaaagtgacttcaatgcttattgagcgcgcggacacaatgtcaatagccctcgtactccattggacctcgtaagtgtgctgcctgccctccttcagcacgcgaaggatgactccagtcttgccagcgtgtttcttacttttaccgcaaacccgatttccaacctgcagctttggcatcttcccgaggtcagattcgacgcggaatgaaagtctgaagtccttgttatctaagcttgctggtgatctatttatttgcgcgcgtccgttgcagggagagccaaactttatttttaaagttgaggctaccggtagtcgcgccatcctacttatcctaccgatggggagtaatgattaaaggaaatacttagagaaattgtaacacggtctggacaaccacggtggcgagttctgttcagctgctgtggatgcgtcgtccagctgctctttcctgacgaggcgcattggtgaaagctgtaaatggttattttaaaacgaagagtgaaaatagctttttaggaggaaggcggcagagatgaaaccaccgtagagaccgtaggcagtcgttagtttcatctttccgctctagcgcttaagctcaccacctccctgcttcctaccctcagccttcctgaagatggttcgcctctccagacgctccttcctccatctacggccggagcaagtcgacatggccatgggcatgccgttcttcgcgaaggtactccggctgggacctgatcaagtggcatttcgcagcctcgaaggagaagaaggggtcgtgcctcgtgttgtggcagaggatcaggtcgtcttgacaagctacgttaccaagtcagcgcgtgtgtcctacctacgacgagcggtcgcggctacgggggcggggtctgttcattacggccaagtcatcgcgacggtaggcgagttgcttacagttcgctccgactggcaacatgttgaggtcgagctgggggggggcttctttggtgctgccaatcgttgcccccctcctcgaacatgtcgagttcaactgcgcggagtggacccaaagcgagctcaaaacgttagaaaccgagatcgccaatcgggttctagaacggggtggcaaatagataaaccgccagatccaaaattaatgtcgaatgcccgcgtacatacgcctgggagggctttgaatttcacgtgctcggaccgaaccatactcttgacataaacattaccggtcttacctttgtgcttggcagacgtcactcgatcatgcacaaattgttgctcctcgcgcgggttgaaatcgtacttggatgccgtgtttgacttcttgcggggagaaggtgctgcaagcgcctgcggtagcttgctctcactgccttcgtggactgctgcagcgtctcggacgcacaccgcctcttgtcgaatacttagaaaccgctctaacagctccgggtcacagcttaatttctccacaataagcgcgtcctgatccaacgcgggccgagaacgcttgcttgtttgaccaatctgcatagcgccatccgacacagtagcgcgcttacccagcgtggtggcagaccctgctggtgcgctcgcgcgctccaagctgtcttgaggcgactcatcgtcatcgctaaacgggtcgaagagctcgtggacctcctgtactgatccttgaccactggtatttcccgctcggtcctgcgagaaagctggtggccggaaaaacgcgtccctacatgtgaaggcgcgggacctgcaccgccatcgacgaaatatgcgaagtccagtgcgtgttgaagtgtaaattcagcttcggcaccagtcttcgaatctatccaaccacaaagcttcgtcgagtcaggaaaactctcatcgtttttcttagtatatggtcatccaatctgccaacccgttaagatcacatgacagcgacgccatatatcctgaagtgcctaagacgtttaaaaccctagcaaacttcttaaagctgtgtccagcgttcctccgcccgacagagcatcaatttggtggcggcatgccaggttatattgattgttgtgttgcactagataagcacgaaaagtagttcgtactcataccacaagtacagcaaccatgtcaagaatgttatgacacttgtctgggagtctgcaagaagcgagggcgtccgtggcgtggtagttcgcacctcaatatttaaaattaacgcataccgattcagtcacgaaatataccgatttggcatttaaaattgatttcataccgatttggtcattttcccgtattttgagaggagacgacgaaggcgaggctgaaaatggttttctcggcgaggagagatcatggtttttgctactggacacaatacgaggaaaatcgagctctccaagccagctgtgtgtgcgtagatgcctggttttccccgccgaacggctccgtatggatgcggcatccgatggcggttttttttccacgctaggtagggtagttagtggagcagcgccattcgtgttcttgaggcgtgactatcaagagagagaaggccctaggtacttgacctggtggcgtatatttaggcacttatttattgaggcgcgaccatcaagtgccggctccgtcaacgacatcatcgccgcggtcacgcgctcgacccacctcgccgctccctgggctggcctctccagccccagtctcggaccgacgccgcgaccgaagcttcgcgctgcgacgatcctcgactcggccctccgaggccaagtctttaatgcgaatggactgctcctctttgccccatcatcttgaccagcggagaaacgtggggtgaatcagggacaatgtgacgcgtgtatgtataccggccttcattgtaatctttaacaacgtattttgtgcatgtatttatatgatgcatgtatttatatgatgcatgcgtagaagtaaattcaagtgcaatgcacacaaatgctagtttgctgattaggtatgggttgtacatcttttgactccgtcggttatcggaagaggctataaatgtaccacgataatagagaatatcataaactgaaatacatacagcaaagaggattgtgtgtcggtattattacatcgtacttaaaataagttacaacgaagtattattataataatacatgtataatacctcgaagtacaggctgtaccctacagcaaaaaaggcctggtgatccggcacagttttatgctggattacgggaacactgaatcaccgtagtccacacggtgcataccatatgtacatgtattctggaatatgagaacagctttgcatagagcgtgtaatgcacgcctatccaccttactttttttagaatcgggattctgcattcccgattttctatgaaatatagaagtctgcgcaaccaacaccaagaatcgattcttccagctgccgaatccctataatgctcaattaacgctattatcaaggcctaagccctagggcattcagtgatccccgatcactcaacactgacacaatatgcacacatttgatgagtcggagtcttgcatgtagtttttgctttcccagcaattcgcgtttcaacccctccccatacacaaacgaagtaaacaatgttgacgatcaaaaccaaaactaagtaagcaatgtggacgctcggcaacagtgccactgttgagcaaacgcccttgaattgctgtggtattatagccttctcctctccacgcccagtattatagtggcagaaaatgatggggctagtaagtcaccgaattttgtaacgtccgaaataggacatcatatctccaccaatacttgtgcgtttgagtccatccgcggcttgaataaaagaagaannnnnnnnnnnnnnnnnnnnnnnnnnnnnnnnnnnnnnnnnnnnnnnnnnnnnnnnnnnnnnnnnnnnnnnnnnnnnnnnnnnnnnnnnnnnnnnnnnnnnnnnnnnnnnnnnnnnnnnnnnnnnnnnnnnnnnnnnnnnnnnnnnnnnnnnnnnnnnnnnnnnnnnnnnnnnnnnnnnnnnnnnnnnnnnnnnnnnnnnnnnnnnnnnnnnnnnnnnnnnnnnnnnnnnnnnnnnnnnnnnnnnnnnnnnnnnnnnnnnnnnnnnnnnnnnnnnnnnnnnnnnnnnnnnnnnnnnnnnnnnnnnnnnnnnnnnnnnnnnnnnnnnnnnnnnnnnnnnnnnnnnnnnnnnnnttcacgagccctcttggagaagaaggcgtaagcaatccattgccgccattcgtgagtagttatttcgtgatcaaatgtcatctcatcatacggctcgagcgggaacatcagctgcatcactaaattgctcgttgtctggttgactaccatcgccgaccccattgcgtgtaagtccacagggagcagcgttggatcgcaatccagagacaacaaatccagttggtgttgatcggaatcgcacccgaaccgatcagggtacgtgacttctcgagaacgtcgagtgctgccaaagagatgcgccatgagttgaccaaacaccttccgcgactcaagttcactcccaaagtctcgtaaatgcctttcagcacagagagacacttcggagaaacagaggtttcgcgtcatcattttgcccattttcgtcaccatcgccggccaagtcatcacgtcttccaagtcagcaaccaaaggcttgagcacgaacatgcatctgagctgttccgaccgcacctctcgcggttccacactcttccacatgtcatgaatcgtcttctctgctctcaaaatgtttttgagatagtgcggtcctccgtcataaacacattgcaccgggattcgaatctccacgccagggttgtaagactttagcttggtatcaaaagctgcgatttgtgcgagcgtctcgagatacccatctacaggcatctcgtggtggtcggtgccacagaattggaccagattcagaccaagatggtcttcttcgtatgccgtgcgttcgtcttgctcgtgatccaataccagataatactcagctggaagatcccgttctacatgtagtttcgcactcccctccttccccaagcgcacgccgcagtgctccttcagcaggtacttccaggccagttggtccacgtgagccactgctgccaagagtgccagagcctcgcggacctggcagaatttatcctggaagtagtcctcgcccgaccactccatgtccagctcgaattcctccccgtcggaatcttccgtgaactggcagcgcatcggaagactcacctccagccggtacttttgcccacacatcccagtcgcgctccaacggcttgagcttgatcttcttgtgcagcaccttacaccacggcagtatgaagctccagcgctgctccatctcgaagagagcggtcgccatcgcgatccgccacaacgtttgaacaatattactgataattggatacaatttgattatcgcctcgaaaaatatttttgattttatattcaatccattttaatttgtttcttaacaaataccaataataagaataatggtattatatacggaattattattgtcaaataatatatttcaaatacagtgagcattcgaattgtgaattcgcctggaaaagtgcagctacagcaatagatacatctacaacaactccgcgtagcggcggcactcggctagtacgtaacgaaaatcgttggcggacattatcgtgatgctaatgattgataagttttagcattggggttaaatagtgagcagtatgctgtcagcatttatggcaatatatgtcggcaaatgatgcatctggttcaactcagtggcgaaattccctcgcaaggcccccgcctccctcgatagacaaagatggcggcccctccgagcgcgtacacccacgcctacaaggacgccaccaacttcttcctggactggctgctgcgtgcacgtggccgcggacatcacagccgcgtgcagctgcagacttactgcgccatcgtggaggagatcgcggcagatccgtcggttctcacgccaaagctgctgcaagagctgcccaaggccctcgcggcctgtcagtgtgccatcaactcgttcctgatccagcaactggtgctgctgcacaattcaatggtggctttgaagaccgcaggcgtgaaaccttccggccctatggatgtgttcttaatgatgatggagccgtatttcaccacgcgcgtcgtgacagtccccgtagttttcacgtgcatttgctggattaaatcggtcgctgctctccagggggacggagggctcggtcgaaacgtgagccttacgttcaagcattctgtggagcttgcacaacgtatcgacaccaacttggagaaacgaacgaggctctctacaaaagccaaggaaatgctggagcgctgctccggggagataaaacaattcagacaactcaagcatttggcaagcgcgaacccgatatacgtggggctttcgatgctcgaatacgacttgaagtatctgtacgtggccaatgaagttatcctgtcgtcgtcgacattttgcgcgctcggccatctgtacaacgcacttgtgaaggagggatatctggagcgtattcctgttttggacgatgtgctgcaagtgttttcactccgtcacgacatgcgacccacggtgcttaccaccggtccttcctgtacagccgcaacattcgaccttctacgctgagtgcgatttatcgtggggaaactccgccagttgggaaagtagcactaaaacaagggaaacaattccacttgagcgatgtgtcaaacatcttccggctgctgatgctgaaggacaagtccgttttgagtggtgtgccatggatggaggtcctgtataatgccgcgcacgcagacttgctccaaggagcttttccagacgcgtgtgctatcgcgagatgtgctacgacttttcaatgatctcacgggtatgtttgacgagctctgtgctgttttgaatcgacgccagtagtgcgccaagatggcagtgtatctggatttcgatgactcgcgtcagcaccggcaaaatgctgctgtggtggtgtcagtaatggcgctcgtgatgccgcttctcgatgctgtacagcatgatggatcaatcgacatgagtgcgctctctggtgggctgggtactacggtgacgaaggacgtggttgtgactaggtgcaagaaggtggcaaaggtgatgaaacgcaggtttggcactccaactgtggagcaaacatacttcactttcctaccacggccgaatttcgtcagtcacgagtacggcacgaaatcgttcaaggaagttacgcgaaatgaaaagcgtgccttcgtgttgttggtgttgatgcacatgatgagagaaagtaaggggccaacgccaagcaatcgcgagctcagctgcgaagcagataagttagatagatacgcgtaggtactcgtcaacacctgttcggcttgaagtctgccgctcccagcacacaatcgacatgcgacggcagcacgcgtccttcacggcgttctcgagctgtgggctgttctcgcctctttacgcgctcatcttgatagttgtgagctggtagaagtggctcttgtacgcgctcagcaagttgatagtcgcgaactggatcagcaaccccggctgcccttgctgttcgtagcgagcaccaatccgtagggtgtcgtgcgggtttgggccatggcagattcgctgctccgtgcagcaactccaagtacctctgaagggcaggcatagcggtatgtcggaaggtgtaggtgatgtcacggtcaatacaccaaccacagctcacgtgctggcgacccacacactggaccaagtagcgctgctacttgtgcgtccgctcgcgctgaatcagcacttcaaataacctgccgtacgcctggtgagctggtctcccacttgatgtcaagtacacattggggtcgtatgagtcgtactggtagttaacgaccctgtgttgcctggtataccgcgaccgtgaggcagcttaaacgccgctgtggccgcagtactcgacgtcacgcacggcctaatagcacggacggcaccggagattagcgtagtagaaggtgtagcacttggggatgccacacagctcgtggttcttggtcatgaccgattcaaggctgtagcagccgtccaggaagttgcacagctctccacggagtcggttgtctcggaagtccgactccttaagaaacttgaggctagcaatgctatcggccactcagccctccagcgcgttgtcgaagagttagagatcctcgaggtcttcaagctcgcccagcgtctctgcgatggggccgctgagctggttgctcgacaggttaaggaactcgagcaccttgcagcagccgagcgacggcgggatgatgcccgttagctcgttcttccttagcgacaggaacacgatcacctgcatgcggccaatatccgtcgggattttgcccgtgaggcagttgccgcacacgctgagcttcgtgagctgcgtgagttgacacagcgcgtcgggcagcagcgccccgcagaggttgtgctgcaacagcagcgtccgcagactctggggcttgaccagtttcttgggggtcgtcccggacagcgagttctggtacacattgagctcctgcagctgctcgcagtcgccgatctggcgcgggatggcgcccgagaggtcgttgcagctcaagtcaaggcgcttgaggtcggcgagcgtccccagctcggccgggatctcgccgcgcagctggtgcttggacaggtcgagcacgcggagttgcggcaggcgcgcgaggctggcagcgggcagacaccccctcaactcgttggccggcagctcgagcgccacgacgtggccatggccacttcgacgccgacccactgctccgggttgtggtagagctccacgagcgcggccacctcggtcggcgggatctgtacctgtagcgcgaggccaaattacagcaatcctccgaatagggcaccgctggagatggtcgaagatcggggtcgcaatagcgaaaccaagtcacatcttttgcaagtaattacgccaagtacctaacagtaaagacggtaaaaaacgttagagtaaaaacggaaaacacacaccaacgttggaaacgttggacgtttttacctgcccttagggcatgccttctgctctttttgcaaagaaaaaagatgggattcgacggcaaacaccgcccttgttacagtatctgcctgcactacccacactcggttttaggaagttttttttgcagtttttgctgcataccatgtcttgtacatcccggtcaatacactgttttcccccaacttcgcctggatagtgctcggagtttccccgagcctgtacatgatcctcatgagtcccgccccgatgccatcatacagcttcgtggttaagatggttttgagcttgccaaggtgattcttgagggttgatgtagagacacctctctctccatcgccgtagtcgtcaacgtcggcatcgccctccttctcgtcgagccgcagatttttcttcttgttggcgttgtaggtagcactcagcgcgaaagccggctcggaatcggtcgtagcggagttggttacccgggtcgagtctgccccgacgctcgatagcagcgtgatcagcgtcgcgaggaagatccagagcagcagacgcatggcagtagctcgtcggagatgctttggcggaagaaaggaaattggaaagtgatgcaaaccaacgtgttctgcgcggttacctcggactggatgagcagaactcactgagttgcatggttgtctatgtgtctcaatgcaggttagggttaccagcgggaggagggggggggtgaaagcgatttccagggtttcacaaattcgcccctaccgaacctggggcccccttaactattggcaagcctgggctcatcgtagagccagccttgccctttagctttctaacgagcccaacttcacttaatgatatttcgtgcggccttcaggccgttccgtttactagagcactcgtggaactttggagatttggcgtgggtgacctccgtccccgcccagctgccagactgggccaaagtatggccatgataaaaacacgatttgcattggggtgtttttttgcggtatcagcagcaagagccggattggatatgatcatgttttgcttggatcggttttgggatcgggcattgtagggctgacacggcgcgactgccgcccagtggtgacacgagaaaacgttaaaaacacacgttcagatctgtgttgcaatatctcgttgcgtaagccgcgagtcgatgtgaaagagaaagacaccacggcgaaggctgtagtctacctaagtaattaagtatgcgttgatatgattccccccttcacaactgagcagagttgccgcggtaagagacttgcgagaactaagtaccgttgggagccaacatactaaactaatatgaaccgaaagccttgcggcgcacacaatgtttgcaggtggacatccgttactctatgagtcgtcaatatactaccatatcgcaatatttacaattgcataactgtaacccgctgtttcgtagctctttttccaagtagttcgcgaagctatttgctaacgatcagggctaagaaagcccaaataaccactggtattctatctgaaataattgcctgggcatcgtattttttgcgcaatatgaaataaatgcgtgcaccagtacgaacagtatttgctgttatgagcatacgcaagttgctgcaacacggtataatatcatcctcaacgagatgtttacacgaactgcatttttttggtaagatgtctctatttccaaactacatttattctgggatagcagtaaagctgctagcgcagcccaaatccgatgcttgggacaaagcggtggccccagcaacggaccgaacaccgcaactggtggcgccggcgcaacgtctcagaaggcgtaccgcaagctccgctcggagtaaggaaagagtaggtccatcaggagtcgctccgtgttctggtcggtttggcaaggacggcctgcgtttggtgtcattaggtaattgtcgatgcgtttgagtatggtacactacgaataaaccgcaaacggtattttgtttgttcaccttcggtcactacatctccatctcgttgagctcatgccaagtggccgctcaactatcaccgtggactgcgtcagtcaacaagatatgtttttgtttccgcgctgaagaccgaccatcctgcgttgcgacttccaaaaagcctacacgtttccgaacactttgcttcgatgtggactgaagccgtccatgccaccgatcagcgtgtggtaagtgcgcgctcgtctagatcgggccgggaaatcaactactaggtacttacttgacgtactaggtactaacttgacgacgactatgtatgaatactatacttcaaaaccgaatcacaagcgtgcatcttacagaggtgactcctttgcttcttttttattgtgtgtcgtgcaaagtctgctgggtcggcaaaatcgacatgtaccgacttcatgtcgggccgagagactgcctgtagcacttcgtagctggagcgttttcagatacaacaagagtgaggttatgaggaagctagacgggagtaaggttacgaggaagctagacttgtatttctttcgttgctacgcagacagagactaaaactcgataacattgataccgctcacggaaatacaagcttcggtgagttgggttgggttgggttgggttgggttgggtagatgtacgaagcctccccactcattcctgcgagcggagcttgcggttggcgttcgcagtcgctgacgcacttgctgtggcaccgccgccgttcgtgctcgggtagctgttgtaagccgcgggggcagcaggcgcgccataaccgcccacgcccacgcccacaccggggccgtagacaccagggccgtagacgccgggaccgtagactccggggccgtacacccaggccaagggaattgatgaaggtgaagatctcacatcagaatctcttactcaactcgaaaagcccaatctcgctcaactcgaacgcggctcattcctgagtttgcaggatccgtggacgaaggacctgtagaggaggttggagcggttggtattccgcaaggctatcctattgctaccttggcactttaataggactgggtacttggcttcacataaccttggtctattgaagataacctattttatctaaagctattatggatgcatggaaaccaaatgacaattttattttagggaatgcaccatctcctgggtccgttgagcttatacactttgttctatcgcgaaaaagctgggttatgtcggcggaagggcagatgcaaaacaatagtggagaagcttagacccttgtattttgttgagccgtcaagacgaccaacgaataaagattattgcagaataacagacaagttgtatagtgcaaaaagtataaccaccaagcactacaattttatatagtatttttgtaggtaacacgctacctacgcgtactatttgtggtattactatagctccaaatttgacttaaaaattgtatggacgtgtcagtactatactgtactactatacctgcgtcagtgaatccaggcaaactgtcacaatcatttcgtcaattctcagtgaacatcactgatttatggaaattcctcttactgtgttgatcagatctgaacgtgtgtttttaacgttttctgatgatcatatccaatccggctcttgctgctgataccgcaaaaaaacaccccaatgcaaatcgtgtttttatcatggccatactttggcccagtctggcagctgggcggggacggaggtcacccacgccaaatctccaaagttccacgagtgctctagtaaacggaacggcctgaaggccgcacgaaatatcattaagtgaagttgggctcgttagaaagctaaagggcaaggctggctctacgatgagcccaggcttgccaatagttaagggggccccaggttcggtaggggcgaatttgtgaaaccctggaaatcgctttcaccccccccctcctcccgctggtaaccctaacctgcattgagacacatagataaccatgcaactcagtgagttctgctgatgatgccatcttggagagcgtcatgaggttcttgtacaagatgggggagactccgatcagtatcaggacgaagatgatggggaaagacaaattctatgtcgggatgtacaagtcatggtacgatgccaaaacgaagtcagtggggcttcacgcaaaaactccctaaaaggtgtgggtagtgcaggcagatactgtaacaagggtggtgtttgacgtcgaatcccatcttttttctttgcaaaaagagcagaaggcatgccctaagggcagtgaggtatcttgctgcgaacggagacgagaatcccatcagtttagcgtcatcctcgacgaggattccagcgttctgaaatgccgtgaggcacttaatgtcactcgtagtaagtttcgttgccattttggatggtagttgcacagggtgtggagccttgaggaaacatttgatcagaaattgtcgagccttcgaactgatcggcgtgtcgtggtctcggccgaagcaccttggcgctctcgtacggcagttgtgtgacaacaagtgcctcatcaatcgagatgctgacggtgaatagtcatcgatttccactttggctgcgttgatcgatatccgcagcgcgctaccaagcccaacaggcctcacgaaccagaaaatcgacaaattgttctttcttgaatcgatcgggcaaacccatgcctgggaaatccaaaaactctctcgtttcttcgtcactaagcaagaaatcacgtcttccaaacgtcacgagagttcgaaactcctcggggctctcgactccagatcttcgcgtggtcccagcagagatgataaagcggacgttgtccggcagccacgatgacatacatgcagttcaagtgggtgtaccgatgagcaaacaggatcaacagcgaggactttcccggggctggaggcgctgataagaggacgaatcggttgttatccgcccacaaactcgtgtacactctttccataagttcttcgcgctcgaggtggggcgagtccgtgctcaggccgtgcaggtaaatctggttaacaaagatcggcgcgttcagctccacttgcacaattagagcttcctccagttttactccaaggccatccagtggagttgccagccgtagaggtttcttgtcttcctccggtacgcgagggtcgtagatattcacctgacttcgattgaccccacgcaactcttgcgagcacttgcgaaggatcttctctagaaagccattcacgacgctagccccatccaacatgacgaactctgtccgcccatcgggaagcacgaaccacacctattgcgccatcgaggcagttttccagcttgtcaaaagtacggcacactcactttctattttttctaagtattttttcctcgtttttgaaacatcacttcaacatgagaatcacagtcggttgcaccatctcggctcctgataccgattccttatctgatcccttcctcctccatttcgtcggctcgactgtaggtcgcacgagcaattcaaaaacggcaaagcggttgtctagggttcctacatggaacgcacgcaacgacactaccctctttcgtgcagaaagttttggccaatcgcatggtgcaaattgttgtccgacaaactgtcttacgttttgacggacaaaatacaatgcagccactggtatactaaaaccaagatgtagccaaaatgcgttgattgcaaaacgcaagacgctttgtcttacggtaggctctctggggctaaatatcgtcttacgaaagagcatgaatcactcttgatgaaaagcaagtctagcgcgcatgtcgtcgttccctgcgtccaagtactcgcgctacaagcgcgccaccgccttcttcctggactggctgctacgcgcgcgtgaccacggacgtcacacaggcaagcgcgtgcagctggagacgctcagcgtcatcgtgaaggacattgcggcggatccgtcgagtctcacgtccaaactactgtaggagcttcacaaggccctcgctgcgtgtcaatgcacttcctcgagcttctgaggagctggctcgacactctgaaggggatggaggtgccaggccccggtagagccgttcgagagctactacgacattctacaggtggacgaggactacttccctgacgaggacacgggctttggggcctctggggtccccaagagagccaaggcggacaggaagaggctgttcgaggaggcgttcgctgaagatctgaagctggagctggtgtgctacttcttggagctggaggagctggtggagggggtgtttgacgtctacgaccaagtgaagaagcagcaacacacgctggtggaggccacagtggcgaaagtggccatgaacacggttagctcaatgacggcgcagttgcagctgaaatacccagcactcaagacggcggaagatgtattcactctactcagggagcaaatcctcgagagggttcagaagcgtgtttccaatgctgtcactgctgcgcggcagaagtttgaggaggggacgcctttcacgcatgttccaggcatgctgctgattgacttcgagaacgttttgtgtacgttgaagacttttgcgggccttttcccgaaggaggcagactgtttctacagggctctttgggggaaagttatggagaagaccggactcttgagtacgtgctaccagaccccagctctagactggtcatcctgatcgcgcagcagttgccgatgttgtacaacgcgtatgtggatagggtgaaccacactggatctggatttgatcagtttggattggtgagctcatttatgaagctcacggaggactatttcaagtcacgcaaggcttcagtcgaggctgtcatggcttgcttgcgttttttggatgaagtcagtcgtgccgctgcaaggaaatgctgatctcggccgcaatgtgagccttacgtttaagcactcaacgcgaataaaggggattatggaggcttggcttcaaagacgaccggaggcgattatggaaatttttacaagttttagcggcatccagtcgaggtcagcaggttgcgcgcttaaaacctctagtggctgggttcttcgaactggataacgacttccagtttttgcgcatcgcgcacgacctggtggtgtcgacgacggcctttcgtgcgtttggccacgtgtacaatgcgcttgtgaacgaaggatatctcgatcatatcacgtttttcgacgacgaattgaggatttacgagcacatgatattcactccttctcaagctacggcggtgcgtggcacttatctgattagtacggggtttagtacgactggagtccgtggagtataccaaggtacactttcagctggaagtgaatcgtatcgagaccggaagaaacctaacatggaggatttgtcccagatatatcgcttgcttcatcatcatgacgctactgttctgaaaggcgcatcaccgaaggatctgctggagaaagctgccgatatttgtatttgagacgcccgttctctctcgggacatggtgacgctcaacgacgaccttgctgatgtactctgtgaaatgttcgacgtgttgagcgaagggtgcctcgatctacttcctgaggcggtccctggggagtctcggaatgatcgcctcgatcgcgcgttggagaatttgatgcctgtcttggcacagttggattcctcgcagcaaaatggtagtaccatggaccccagtatgattccggcggaagctcgaaacgagaatatgggaagcgagcgtctccatgaaggatgcagacagatttcagccatagtcaaagccaaatttgcgtcgtcatcaggcttctgcgaggataaatacttgacttaccccatccaggcggactttgtccgacaagagtatgggtcggcgtctttgaaggggtatacggaggcggaaaaccatgaggaggtgtttcacgagctgatgaacttgctgcaaacaagcaatggtccactccgtgaaagaaagttggagcacctgaaagacgaaatcaagaaagatcctgacctgctggccatggtgtccctccgtaaagaatcggacgaaattgacgtcaatgcggttgaatatcccgacgacgatctctgtgcactgttccaccaagccgcagccggccctagtcacgatttgcacctcgtcgagtggatgattcaaatgggggcgctaggtagtcagccactacattgtcggaagaagtctagacagcggaacgtgaagtgcgacggggtggttctctcgaatacaatggctgtacacagtgccgcaattgcaggtcacgatgacattgtgtgcacgattgtgggtgcagacaacatgctggacctggacacgccaaccttttacgttggcgaaacacttgcacatttggctgtcaaacatggccatcgggatgtgtacgatctggtcgtttcggtaggggccgatctatctcttcgcgatagcaacgggaagcgtgtatgtgatgtaactacggatcagcagtggaggggcaaaattgtgtccagtattctgcaaaggaagacggttcgaggatctatgaggagcatggcccttttgacgttggttagggcaaaaattggtttttgtccaatgatagcacacttgattagaaaaacctcgttgattttgaagcgagatatctcgcttacctgacctttccacaagctgtaattggttcaccaagctaacattggcaatagcaactcatcctgaaattgcgatgaattatcgctaatttttgatagaattacgaaaaaaactacgaaggactaaaattgctggcagaaaaggcgttgtgcctccttcagttctcacagataatgggcagcaaaaatcaggcgttagcgcctgcctttaagcttcatgataaggtctcacatggccaaaaagcttaagtagaagcgaagatagagcacaatttcgaaatcatcatactttcgtgggacagagaagtatttcttttgtcgattgaaccccttggaaatctcatccggtatgttcctgagcacggcatatctgtctcaactgactttgttgccactgggctttacttcgctgatgactcaacgctcctatcgtgttcactagctggattatctctccaagcggaaattgtgcagcaatattgtgctgggtcaggtgcccgtttgaatcttgacaagtcgcagcttttggctttccatggagctcgagtgtcggctcctacgtctctagtcggtgttgctacatccgagtctgtcaagtacctaggcattcctattggccaccatgtgaccgatgaggttgtctgtgcctcgctcgaagcccgggttggtacgagactggcccggtggggcccacgagagcgtacgcatcgtggcagactgctaattcttcaagctatggttctctctggcatttcaccctgcacttttcgctacccgatgctacggttaagcgtctccaatcgctgccagaggagtacttattgaccaggcgaggggatccatcccgtcattttgtgaagctggccaagccttcgatttgctaccactcttttcgtaacggagggcttcagattcctcacctcgccactattttccgtgtgcagcggctaaggttgccacagcaacacgtgacaatgcccgacaatgaaccctggcgagccgctatcaccgcacggggtctgacatttcaggcggctccacggagcatccattcggctttgtcacctgtccgtataatgttcgatcggcgtgggtccgagttgatctcctctctacatggtggaaacgtacgtggaaagcgtggtctacagttgcgtggtttcaacgaggtgatctcgttgaccctgttcactttcaagcatctttgctgcgttcgtagatttggcactcaacacgcccccttctgcatggtggggaggctcccgccacgcttctaggcaaggcgggggagacgcggaaatttcgcatgcaatttgctgctgagaccggatgtcgttgtctgcacgatttcatgaacgctgggtggcctgaggctccagcttttctgtcacgatttatgctggtggtctcgagtctatcattactatatcgtattcggcacctgatgaacctttacgtggatctgagtagtggcaatgttacgagatctggtggcctttatgaaggtccctgcattctaacaccatcacttcctctggttggagttcgtcgtctgcagcaagttattctctttccaaggctacagaagaccgatgtgtggcggctaattgggtccccccaatttgctttctgcgatcacccactcgcacaccaagtttccggtaccaatgcttcgaagctggccgcgacaattgcggcgactaaacttcttcgcagtcttgcccttcccgtttactccgatctgcagttccgcctcagctggatgttgctccccacaagatctcgtttctatttcttacggatacccggctccagtgatcttgcttgtgggtatcccaactgtgtcgaggtggagacagcacatcatctcttcctagactgttctcgcgcagcagtgctttgggccgtcgttatgcgggactgaaccaactttgtcgatggttctgtcacctcggccatgatctgaacactggaggagccccactgggcacctggtaggtatcgagcgcggagcaactgtcactactctggacgatcacgcgttgcatcgtcattcacgtgatttgtacagcccggaataaacaccagttcgaggataggcctccccttgacccagccacgacgatctatcgagtttactctgtctttggcgctcattttcgagctcttttgcggtcgtccgaccaaccaacacgagcaagacttcgccgatgcctccgacagttccctacttcatcctgcttgggtcgcttcattgcaacccacccacggttattcaatctccggttgtctgccctctataccaacgcctcggggcgcctacgggctccaccgttgtagtctacgacgccagtattttacatttgtgtatgatagctagtgtacaattctgcatattgagaagtccagataaccaacaacacggttaatcgttaaccccccccccccccgttatttctttacatcatatacacgcaagaatcaattatacaatcaatcccaacaaacgcgaatcgttatcgtacgaattcatgcagccacggggtcgcaataggccccacgcaccgaaatatcaaattcaccaacttgcacagtgcttatggaagccttcgattcgtcgtcattaaactggatttcaacaccattagccacctccatgacaatctcacgaactttcttcacctccagtttgttggcgccgccgtacagaactcgtctgccttttccgccaagacataccacgccactcagttccggaatgccctctaccgctgacttgagctcatcaaactgttcgttcgtcgtctccctctaggtgccaagtcgaagtagactgggtgcccaaccagcccgtcaagtcctcgcagaagcttagcgctccccagagcggcctccaagtaccattccaacgcccgcaacgctctggggctcgacgcacactccatacccacactatcgcgcgctgcagagtacatttggacgagcgctcgaaacgtcgacggatctcgtttgtcgaagggcgttttcagcagccgcttctccaacacatctacaccttttctcggtctacctgagctaattagacaagcaaaggtggcatgttttagtttggggtgcacaagaagcccaaattaggaaacggaaatctgaaattgacaaacaaagctgcctaaccttcattcaatgtgaagtggtacattgtaccaaaaacactactcgccgtacttcatgtccttcatgcgaatcgccgcgacgacaaacttcgctgcgtgaagctccatcctctgcaccatcgcctgcgtgatgcgcggtatgctcacatgcacagcacgctcgagcagctgcatgcgagcttcggtctttgagatgcgtgggccggagcttgtaggctgcgttcgggggcggttcatctcgtcgcgcatcagcgccaggtactgcttgatgtgccccttgagagcgctgaagcagttttcaattggattgcacatcgggctgtaaggcccgaggcgcagtaggacgaggtcgtcatgagcaggcaccagcgcgttcgtctgggaatgcgctggggcgttgtcgaagacgacaacgatcttcttgtcggcgaactcgttcttgtagacatctgcctccttgatctcagtgtacagtgcctccacgaacgcagcgttcgtgtccactttgatgctgccacggtgcgtacggtacgcaaccacgccaaacgcagaggacactgcacactggatctgcaggttacctcctttcgaaggcggcagcttctcgacagcccgcttcccctcttagcacgtccgcgcgtgcgcttcgtgtacaaactgaaatttgtttcgtcgaaatagagaacgaggtcggcatcatcgttgtggcggacaagagcttcggcaaaagccttcctcttccccttgttcacctcaccattgcacgtggtgggctcgaaacgagtctgtcgtacaataaaaatagtacgtgtgattagaaccataacgttaaaatatactcatgagctcacacatttgacctgcttgaccgtaaagaacatgcccacgaggtggcgcgaaatcgtggcctcagagagaagcacgttaaactcgctcatgaccatggtgcgtagcgtgctgagcgtgtatgtgcagcactcgtccagccacagctccaaagccgccttgatctcgggcgtgaccttggtggcccgcgcacccccgcgcgggaggtcttcgacgcgtccagtgcgcacaaggcgctccgccgtggtcccggggaagccattgtgactggctacagcacgccagtcaccacctgagctgtgcgcgtcgaggacgcggcgacgctcttcaggcgtgtggggcttggggctgggcttgggggaggcgtgcggggacatctgtggggctggaggaagatcgaagaatgaaaactgaagcagccccgctgcgccagcctccacgaagcgcagctcgtttggctgcgctgattcttcatctggcatcgctgtcggtgaggcaacacctgcactcccgttcgcttcacctctcttcttcgctttagctttttgtttgctgtttgaggaacccgaacgctgaagcgcttcttcgcgctgcggagaaactgattttcggagctcctgcattaaaagaccaatgacatttgttatgtggtacacaaaaaacctaaccatactttcgtgggacagagaaatactagcgatgagagagggtcgccctgtttgacccctcgtgtcgggaaaagtatctcctgcagtggtccattcaccgagagcactgcctgaacgtcggaatgcaggagctggatccagcggcgaaaccctgttccacatcccacccgctcaagcacccgaaacaactaatcccagttcactctatcgtaggccttggcgaagtcgagacagagggcaaagccctggtcaccgcgacggcgtatcagacgctgtaaatcttgaatataacgaacatgatgatgcagagatcgccccctttttgctccgtgtgaatcaaggctggcaggaaacgttgaagccgacatgcgagcgtcttagaaaggatcttgacgtcgacttgcatgagcgatattggtcggtaatttaccggatcccgtcgatcaccttttttgtaaagcaaagaaacacacgactttcgttgcgatgaaagcaggcgtccgtgctccagctcgctcgcaaaaccactgccagaaccttccaaaaagcgtcaggggtaagcatatagagggcggacccgagtccgcccagacctggggcagactcacgtctgagatgtttaatcgttgccgccagttcgtctgcggtaataggttcatctaaagctgctgcttgtgctgcgccgagacgacgcacgatggaatcaaggagaagaacacttcaccaatgtctacctggtccctagactcggctccattaggtagtaccacagccggaatagccgtcgaacgcagaacagaatcaggaggccgaaaaaggctgacgtagaagtttccattgcacgcgcgtgaaagtcaaagccgcgattctgttgttgctcgtggagagcttcatgaacagcctctgcagcagcaactgctgcgaccagctcatccgcagacgcttccgaattactcgaactgtgtgtacgttccaggtgagcgacacttcgctgacagtcagctaggaggtcagcgtcttgagcccgtgtagtgttctgagcgagctgcaactgagatcggatacgtcgcttccacccctcccagaccagcgctgggtttggtgctgtgtggatagttgtagccaagcgctcgatatcttttataattgagctacgcaccgagtcattgtccaacgtagagggtcgtaatctccagtagccagcggcaggtcgttgacgtgactctccaagcgagacacgaacagcgagatggtcgccagagcggggagcctggtaatacttgaccgagtcgaacaagacagcaacccaagaatccgagatgaaaatgtagtccagccgattgactcgaggcagcggccccgaaaacaatcgccggtgaggaaaccgtaacctccagggacccgtaactcgaagagcgactaaccatccaaccagttctccccgcgaggcgtctgacacgcgagttgacccacgtgaatcaaggacaggatcaattgcaacattgaggtcccctaacacaacatgatgagcgtcaggctcgaattgcgtaggtaaacgctcgaaaaacccacactgctctgctggccggacaggagcgtagacattgtggatatacactggctggccttgaacttcttgccgcactaagaggtaacgaccttcgattgtggcagcgaagcggtgtccgcaccaggaagatcggggtgaagtagtgtcgccactgcgaggccctattggcaccgggctcatgccattgcggtcgctaataaatacattgtgacgacaggttgaagaaacgtgaaatctgaacttgatgatgtgcgtcgcgaaacttggtctcttgaatcgcgacgatgtgatcaatgaatttccggccgttgtgcttgatgccattggtgttgacggatagcaaatcaacgccggtccacggaaacttcacttaagcgaggggaagcttcagagctcctgccccccatactggcccaagggaagaacatgcgataattagagccccactctcctctggaaaccctcatggagacgtgctcaagctccgcccagtaattgggggagtaaaatgctcgcggttggacacattcctgagccggaatatttttcgccaggcgcttgcgtggaggggggcggaacggagggctcgccggctccggctgtgtattggcttcctggtcttcagctctcggcggtactggtaccaccaccgagccgcccgagctgtccacttccatcgccgtacggtcgtcacgttccaccgatacaggggcgggggaagactcgactgagctttggcgaacacgcttgctcccgcttacagccgctgacagcttcgttgaaaggcgtttcacaatggcgccatcaaggccaaaccgcagtgcatgcggggatggcttcgatgggttgagaaagtattgaacagcaggcgctccacctgctctcggagagtgaagaagtccgccgagcaccacttggtcgcacacctggccatccactatcagcgcttcagggcactaggaagagttaaaatagtagcgcacaattcccgacgatatggagccggtcggagagcggtacgtgaagttgatatacagcggctggcagccgctagcgagaaaaccgcgaaacaagctgcaggccacttggtcgctttggacacccagcacatcaatgtaaaagcatccgatagagggttgagcgagtcgaacgtaagcgtccgccccggatactggcaccgctgaccggccaggagttgcttggtcttctgggtcttcaagtagagaacaacggagttgggaggctgtcgatgagcatgagcaatgtcgccggaatcgatcacggagcggacgacgtcattgtccttcaccgctactagtccaaggaccaacagtattacggcccgggtgtcgtcgtctctgtttggtgtgcctcgcccggcccacggcgtgtcgggaatggcttcgggttgggcagctttagctgcagcaataatttctgcagatcgggggagtcttcggtgtacaagcgacggacagcagctagggcttcgcgactggggaggaggccacgcgttcgatcctgaggtgctgccggcgagatgctgggctcggcgcggccagtcaccaccgctcggtacgatggctggcgcggcggtggagatagtgttggcccctcgacttggactggcggagacatcgggcgatgacccgaacatgacacggcagggtccatgggaacggtgggtcgctctgtgcagacgcggcaggcgcagtgcgcgttaaaagcgcgcttggagtgaccgacggttgctccgctgcaccagcgtcagcagctaccggtaggatagaagcccctgagggagcccctggggcgctggctggagaaggcatctcaacgtcgaggagagggagtaggaggatagaatccggcgctcaattcgtgtcgcacttatgaccgtaaattgagaagtgaaaagaaataacgggcttctttttggatacttgtatgtccgtattaacctcccgacattgacgaatgttggcgacttatctttgagcccaaaacgtcagaaaccacctgtagtgaccaccctttccattgcacttcatgctttctgctaatgattgcaaaccacataacacgcggttaacggttcttacagcttgtaaactagcggctcttatcgcttaccagacttactgtgccagatatttcactaggcctttctcgtgtgggtgcctcgcaatatgagcagcgattgcgccagatattctgaagcgatccctgcaacttgaataggggcactcttcttcctcctcttccgatgacgagccagacacctgggagctcaaccccatatccagaaatgctgcttgtagttggaatcctggtaaaacggtgcccccgtcgaggtctctccaagttttatcgtcaacgcgtcgaacgagtccatcatttccttgggcatcacgctcgtactcgtacatgattttgttcatggaatcaatgagccaccccagctgaacgccacgagggaaatactcgcgtcgcatcttgtcgtcaagagcctcgagccttgaatgcggcccagcgagagtgtcgatttccaccacgcaacagaacagtgggacaaagcaattgaatttgctgtggtcaagtcgatgggtgtggtgagcggccccaagaccagagatcacttgcttgccacgcgcgacgacttggttggccgcgccatttgttgcgatagtccctttgatgttgtggctgcgtgtcgtgggtattcctcgtagcaatctgagagccatcgacctaggaacttgatggatagcttgtctgcgcccccggcggccagtgccgtggcgcctccgattcggatggagtgcgaggagtagttggatgctggaacgccgattcttcgcgccgtgttcttgattgccttgacgactacttgagacgtgagcgatgcgtacaagtgccggtccgcttcgcacttgagcagttttcgtgcttgttggatgtggtgaagacctttgaccgggcacaacagcttgtcgcccgatacacccactgttcgccatgcgccccggccgtattggtcgttcttggccctcgaggccgatggtgacggatgtagccgcctttcgtgccacgcgcctgccgttgtcgtcggcgtagaatgcgtagcaggtttttaagcagaagaaccggcgggtcttgccaattttgaggaattcggactgccggagaagaaagaaatagccgatgacgatgctcccccagagcaagcgctgtcttggtcttgacaagttgagtgagctgtacaacaagcgaaggaatggcggagtcagcggttgtttcttccgtcggggagcggagagacgcttgatgccttgaagtagtagttcgagcttcgggcttgttttgagtgttgtgtctttgtatctgcgatgaaaccagcggatgctggcgagcttcagcttgatggtcgagtattggtttcccttggtgcgagatcttcagtcccccacccagcaggatgtagcaaagtatccgagtcgtttggaagctgtagatgctgtgagccattgagaccaccccgtctttgccgcgaatgggcaccattggtgccagtgccgagtgtccgtggtgttggtagagtttgccacggcgtactgacgcagcaacgatcccagacgactgatagattgtcgaaaggctctgccagatgagtctgcgtccacgaggatgacaggttagctcattgattagcaagagggtggtcagcagtccacacgcgagatccggcgtccaccattacgttgagtttgccggcgatgtgcgaggcagtgaaaacgaggttgtactgaaattcagcgagcgataagagtcgattgtacatttgagcaatcggatttcggcttgcttggcggttcgcccacgtgactgcacttgtgttattgatgtgaaattgaacatgcgtgcgtgttgttgggtccggtgaagaccagtacggcccccaatgcaatgccgccagaactgcgctccgaagctctcgaacgttgatggaggtgtcacgaatgtcttcttgcgagaacggttggcgaatgtaagtctgcaatgacggctcgagaatgcacgatccatctccgcttgcgtccatgaaaacgtgatactgcggtacagaggcgtctgcgaagtagatgactgggattgagttaaaacgctggggttgttgaagaacggtgcaaaaccagcgaagatcatcgaggctgggttgcgataacgagcagcggccgtacttgggggagcgggcggccacttcctgtaggcattgtaagaaagcccgggccggcggaaagcagctggcgacgtggcagagactttcaattgcctcgagcattgtggtgcgtgatgccttccctaccgccagcggattgttgacccgcattgacgcttttgcgagtttgtccgccggaatcgatactgtggcagcctcggtatcccataaaagccccaaagctttgcactttgtcgaccaagttgtgaacttcagctcattgatggccgttggacccacgacagtggccattgctcgacgaagagacaggttggcgtcgatgcatcttgtttctgcgtcgacttcgatgcacgtgtggttatcacaccacacatttccggcgaattggcgagttaggctattgccgtgctcgtagagggcgttgatgatggtgccggcgagcgaataaaacgctggtgatccacaccagccgaacccgcatgccagatcgataacgagcagattgtcgaaaacgaatgcgaacatgtgaaccgagtcagcatgtattggaatgtggcggaacgcgccggacacatccccgagcatcatcaatatacattctctgacatgagatgtactgagatggtggatacgccttgcaatatcccgaggcgggttgtacgagatcgatgagaagttgctccggtcagtgcagtagttcaccgattgaccgcgggggatcgagtagtcgttgattaatcgaatatcaccgacgcccgagcccgctttcgcgattgcgcccagtggactaatgaagagctctggtcattgcgcagcgagacgggagtcgacgatgaggtatcgcccttcgagttgttcaaggtgtcgccggatctgcgctgacatgcggtggatgcctgcgtgatttggtggaggtgtcgactgtgtaggaggtggccctgtcgtccagcgcgggataactccatgtcggacgatctggttccattccttgaccgttgctgcaattgccgggtcgaccgatgttgccacctcgaaaagatccttggtgggtcgcgggtcggaggcagtttggccacgcaggtggcagacgacctatggtagactccaatggctttgttccgctgactttgaccaaaactggacttggtcgcgatctaggttggccgacgtggtggaggttcgagtccgaagtcgttggttcggtatttttcatgcatagacgcttgactcacggcacgaattcgattcagagttgacataaacgtattgtggcgctcgattgcttcgcgatttggcggtgatctcgggctctccttagcttgatcactacggggccgtcataaatcgctgagctgtgtaccgagacctccccatcgttccaaaatcaccttgcgcgctccttctgggagtgcttcggggcgaacgtgagcactcgaacacttcgaaaactggcaaccagcctgcgaaagatacttgaggcaaagccgtcgcccgccctccgctttcggtagttgcgagtataagtcggctgggatgcgactggcgcctggagtgcgattgccgcgatggcccttgtctccgtccgtcactcgagatcgcccagatgctgtgaccggcttccatgtttggcacgagtcacggagggcggccagcttgtcttcgctgcggcaaaactgtgctgatatcttcgtcgccgcgcccagaccctcggagaggatggtgttgcgaaataggctgaatttgctgttgatccagaatacgaatagtcgcgccatgctcgggtccggtcgagtgtgatcggaatagtcgatgatgaagtctttagcggctccgatgaagttcatcgtttcactgttgtagaagtactgaccgaacttgtaaagtgctgacagtgcgctgatcaggtcggcgcagctgaaggcctttggcggggtcggcaaactgttctttgccgagaagtcccataagttgacgcccttctcgcttgtcatgacctcgtcgtcccagcgaacccgtcggcagtgcatgatcgatagtcaaagggcaaatccaaacgaatgtaaacctcgtaacacggcggggctccccaggaaatccacgtgtggtgacggctggaccgattgaagcagagtttgagcgaccttacctttgtgtcggcggttgacgatggcggcatgcacacgtcgctctgttggggatggatgaaacacgatgccgcggctcgatcttgcctgctcgccagggctggactcggtgctattgtcggagctgtagtcttcttcgtccatacgctgacgcttcgttaacggggcgttcatgtgctgcacttcatggatgtcgtcttctgctgagaggatggagtcgccgccgtcgtcagcgtcgtcgtccccgtcggagctcgaagattccatccgttgcttcattgcctgttggcttacttttcggcgcttgcctggtgccgaggtgttcaccaccgaccgtgccggttgctcactgggcgctgcttcttccgcgactgctacttctctgtctgtatatagatcggctgggaggttggcacgggtggcggttgcgaagtcaacgatgtgttgccgtcggacttggactagtcccagcgttgatgggtttaccagcgggaccaactcgttgggggagaacggcaccgacaggccggccagtactgtcgctggtatgccagatttgcgcttgcgacaactgccaaggagggcgttttggtgatgatggagctccatcggatcgattgccgcaacgttggcgccgtccctggtcgcagcgcgtagttgagcgggtctaccttgataaccgactgctcgtctgtcagaaggaggcgtgtgggtccgccgggactcacgatgtgtaagatggcgttcgtgtcggacactgtgtagcctgagaccacaccgtaagcccactcgtctacccctgcggcagtcgtgagaatgaaagcgaccgggtgggcgatataggaaccgggccaaagcttacgctccggttccggtaccaattgaaaaccgatgacctccgtggcgacgtcaaatgtctgtcgttgttcgagtcggggccagtgatcttcacttcagccgtggtgtcgttgaggctgacgacttcgacgtactgaaaatcggttaggtgactcgcgtgggccggtctgatgaaggcgagagccccgacttgaacagacgttggcatcgtcgatgcgggaagagtggctggttggtttcttcgctttccacgagctgagtgaaaaatgaaagtgaggtctacgagtggtcgaatcctaaaacgtcctagggtcctcgtgtgcgctgcgatgccgtaagttgcgatgcggaggaccgtcttctgtccttatgcttccggaaataggagtatccttgcagaatacttccgctttccaccacgaaagtcggagcaaaaggagccccaccaagagtccactcaggtgaatttgttgcttgtctagtgtctgggcgaggtgtgtaggccacatcgggggcccggagcagcgtgccgtcgagaaaatatttgccttgcgcgcttactcttgcaccatggacaccccacttgacccactggataagtaaagtgataatttgcggtctgatcacggagcgacacgggaggtccatcttgaatggaataaagcggccatcatcgacaaaaggtcaccaagaacgggatgcaccaacgcaccgttcgtcatcacgtgacggtttagctgctcgagagacacactggggtagtcctcgacgcagcacagcgtctccttcgcctgcagatctcgtacgagccgtagcaacccgtgctgggtgtctatcatcttggccaccagtctctctctcactttttttaacccctctagccccgcttcctgtattctacagggtaagcactcttcttatcctgtacaatacagtataagaaatcacacatacattaatcaaatgaaactatacaaataccaagtgatttgaaccgatcacaagataagcaaggttgttgctaagctcgggaggtataattcgtggcccaggtttttcgagatttagggaatttgcgtgcgcccagcattcgcgccattcgcgaatcggacggacggaaggcaagtgaaggcaggcacgtgatgggtaaacgcaagcacatcaagcctctcacatggtccaagctgtggacaaaactaaaaaagcttgggtggcggtttgagcagccgaagggcctctccaacgaaagtcgcttctacacacgtgcaggatgggagaaacgaccgaatgcaacacaccttgtcgactattttgacggagtagatgaagtctggaagcatctaccagtccacggtacgcggcaagttgcaataatagctttgttggttttctaacgctacgacagttctgtacgatgaccctcctaccaaacgccaagctacggaagccactgaacgcgaagcacatacacccgcgggggcggcagcggcgaccgccgtggcgtccgactcgccggtcgaggcttcgccgacacgccaatccgcatctccacctctgaacccgatctcgagacctgccccaaagtccccatccaagtcgccgacgaagacgcccaccacggtgcctgccaagtcgccgtcccagtcgtccgcgtcaccagcgaagtcgctcacaaaggcgccggcgaagtctcccgccaaggcagccgccaaagcaccagccccgtcatcagcagagacaaccccagcaaagtcgctcgccaagtcaccagcaaacgcgaccccaaagaagcgtgtcggcacgatccagaccaatcgacgaggatactgcaagatgattccttacaaacaagcgaagcggccaaagtccatggcacgtgggtcttaccgaattgcgcattcgaaaacagagcccggtatgttagccgtgtcctggagggataatcgaccggtgcacttcatcgccacgggctgcgacacacgaccgacgagattgtcaaggcgtgcaggtgctgaagttgtcgacgttccagcgccacagcttgtgaaggactaccaagacggggtgggcggcccggacttgcacgatcaactacgtcatcagcgatattcaattcaggtcggttttgctttagctttcttatcctttattcccccagattgggttgctgacaaacgattgttattctgtattctacagcaaaccatgaaaatgaggaagtattatctcacgattttctcgggctggttgatatggcgttggtcaacgcttacatcatttatcgacgtgtccaagctgagcgtgcacccggcaaagctccaccgactcatgccgagttcataagattgatgcagacggcgctgctgggagtgggggccgcggacttcgaaggtgacttgtttgtccgagcgttggtagacacgccagtatcgccgtcgtcaacaccgcgctacacgctaccaagacgtcacacgacaaagcaagtggacatctaccgcgtcacgcgggggaagaacggcaaagagacgaggaagcgtcgccagtatggttgcaaggtgtgttcgctccttcggccggggatgaatccgtgggagacgaccttctactgcgttgagtgtaccgaggcaaggtcaaaaggggctgcggacgacgctgcatgcgccaaaggaaatatttacctctgccaaaaggttcgccagcacaatccaagcgcgccgacaaactctgcgacctgcagccaaatttggcatgacctttggcgtggtggtgacaacattcctccaggactcaagacgatcagactgcgcactgcaaaagtacgtgacgtacaacaagccaccggagctgccgacgactccagtgatagcgacggcagctcaagctcaagtgtcaggtcgtgtagtgcacgaagttcgaacagtgttcccagtgatgcaggcaataatcaagaatgaatgcagatagtttgtgagtgatggtatttgttgaattttgacatttttctctacaaacctataatttggatacggagaatacagggtatcacaagacagctaccaatgataccctgtacagcacactgtagaaaacaagaattgattgtgagtttcaccactccttgcaaaaactccgcaatagtaaaatcaagtcatttccttatcctgtagaatacagggtaacttttgcccaaaatcgcggggctagaggggttaattgtggcacccgtgaagccaggcagcaagagactactacgggtagacaagattgatcatttaggattgatacatcaatcattcatgtacatttttctcgttgcatttttccaccgctatccagcagcagggttgccgaagattatggacacgagcgacatcgatgtgccacccgatggtgtactacctggggagttgttgcctcggggtaatgccagctacccagtgtgccgctcctaaaaagatacgaaggcggggacttcattaacgagcgcgagtgttacaaggagtactgtgggattattgagacgtagctggcggtggagccaaacagcaagtgcatacctaaaggcatgtggagggcctacgatacgtgcgtgcccgtgacaggatcgccgggtgaggaagccagctgagctataatagagggggaatcgtagtaacgcaggtactggcagcgacgtttactgcaggcattggcatctccgtcttctatgcgttttgcttcgagcacttccagcgacgtcctgactgggtcgtcatcacgcaggcgttcctcgataagcagtcgcagttggctgctatctgtcgggacggcaaaaccagatttatctacctggagggcatcaaagcagaagtcgcggcagccgtgaaagaagcaggccgttccccaaagaccgtgctcttcttgtgtgaaggagaaccgggcatagttcggcgggatggccacacggtggtgtttgtgacccgcagcgacgcctggatgcggcagcacgcggaagttcagtacacctactgcccccgtggacacttagcgagcttcgggaggcagtgctcgtgtttgggtacgatattagcgacgatgtcatcggcgagcgctttgggcattttgggggtgccgctcggccgtgtctgtcgcttgatccagagattgctgggttctaccttgacgggatcactgactcgatcatgaagatccgtgaccgaacggatctcctagacctgctatccggaaaggatgatagcgtgatgctgttggtccctcgagcggataacagaacatgcgcagaaagacaattcgcatctgagttcgtggtggagaagctagcggaacgtctgcagttgctggcgaaatggaagaaaaaagctgcggtgacgttgctttgtgggcttcctgaaggcgcatcgttgattcgttatatgttcgagatcagcgttgacgacaaagatcatgaatgtactgactgaatacggcttgtcaggagctatttcgcaacctctccagcacgacgcacatgtcgaaggcgcaggaaaatatatcagtcgcggctcgcgaaagtattaatctcgaggagcaagaaaatcgttatcgtgaggacggtgaggacctgagtgaaaagctttggtggccgtatttccaagacgagacaccacacaagttttctttttatacgcatgaatcaattatacaaacaatcccaacaacatcgattcgctttcgtacacactcatgccgctacggcatcgcgaaaggctccacgcaccgaaatctcgaattcaccaacgtgcacggtgcttgtggaagccttcgagcctagatcatccaactggactccaacaccttctgcgacccccatcacaccctcacgaactttcttcacctccagtttgttggcgccaccgtacagaactcgtctgccttttccgtcaagacataccacgtcactcagttccagaatgccctccaccgctgctttgagaccatcgaactgttcgttcgtcgtctcgactctgagcgtcaagtcgaagtagactggccagtccgtcaagttttttcagaagcttagcgctccccagagcggcgtccaagtaccattccaactcccgcaacgctttggggctcgacgcacgccccatacccacactatcgcgcgctgcagaggacatctgcacgagcgctcgaaacgtcgacggatctcgtttgtcgaagggcgtcttcagcagtcgcttctccaacacatctagaatttcacgagcttgaggtttcctgtccatggaattcaggagttgtaccgtgcccacgacaaaccaagtaaatttcggcgtcgtgtcacaaaggttcaggatagcagtatctgcggtggaggagtggctcatccgatgaaacttctgcatcatgtgaatggtcttgaaagactttgtagctacggaggcccgcagccctgaaaaggttgatgccaaccgggtggggtgagacagatcgattccatcaactctgatttacgtcaacgttccacctaataatgtggcattcggtaaaaccaacgtcccatactggctttcaatcgaatcatacggtgaaatatatcgtgaaatcatgtttgatgcagataggatccacacggcttcaggattttatcacgaaaaccccgcatcacatgatcaagagagagggtagatacatgtatggatctcctcaacgcggtcgcgagaaacgcaccgacgggagtggttaccgtatctgatgcagaccatattgtgatggctctggctcagaactcaagcttggtttggttctggaaattctagatgatttcaaaaatgctatcgcccgctatggggggggggtaactcaaatggtgctacgttggtcctaactgacttttgtcagtctggtcctgcttacctgccaaaagagaaggtgctccatgtatcttttggcgaatcgctcaagactgcaacgatttttagtatctcgtcgattgaacaattacactgaggttctccatctgaactgcttcgtgaattgggtccacgaaggcatgttctaaaacatagaagggtggtaccatgttagacgtttgcggacatacagagacttacctgtggaatcagctcgtagcgcaactggtaacggccctttgacattattttccgaagtatatatttttatgatcgttgtggaggtgataataaagtagccaacaccccatactgcatgcaggctttttatcatgtattatgattctgttggatttgctcgagtttcggagagctgtgttttgataagaactcgaaaagaatttaccgtcgatatagtatttacatggtttgcactcctaaacttgcgagcaatgtagctatatcaattattataacgaatacattgaagttaaattactctccgagcctctggcacgtaaagttaaccacgtaaaagtgcacaataacctaaacttcatggtcgacgttggtgttgtggcttgcgcgcgctaaagaggcggagcggcttcccgtttgcaattctttatgttgtgtaaccttatcgctgtagcaacatcgtgagtagattattataccgtacttgtatattaattattcataccttgttgatttgaatccacctgggatggaactcgtgatctgtccggcgctatgctgaaccatagattccgtaccagtatacagactagttagctcaatgtatgtgtactgtgcacgtagtgtcaatgccaccctgacaagagtcctggcgtgcggattcttgcatgtaggctaccatctgtgccccacgttggcttagaattgcatctcaagtgaaactacaccgtgggtgtgcagtagtaccccgtgggggtgtttagtctaaaatacctttccgcattttgaagggcgccacgtaacgtgtccactgcttcatctcagcccgttgagataacagttgcgatctgttgcgtgattcggagcttgctatctaaactcactgtgtcgactgggcatttcacttcgcaaatcgcagcccgatacacacacaccaatacgggaaggtactaggcgtctggagtgcgttctactcgtggttttagccatgttcctagcagaatgcgacgcagtgacgaccggcaaccaggcgacggcgaagttgactccaagtacgagcaatagggatccccggtgctcagaggctcctgcgaagcaacagcgccaacgttaacgccgccgatgccgaggacgaggaaagagtgggggctctaagcaagatcaggaactatcttgcaaggaacgacttcgatatgtccaagctgtccaagatgatggatagcgacgcgtgtaagataaaaatgttcaagaagtgggacatagcgtcgctcagattcgagataagatgaacctcgacaaccccccccagttcaagaagctgttgctggactacctgaacaactaccagcgcaaagcgaccaaagtgaagaaagtgaagcctgcaatccgggtgcgtcctgacgtaaagcgcgtgaccttcagcgatgccgtgagtgttcaaaggtttaatccttagaaccacacgctgcgcgtcggtaatgtatttgagtgtacccagcgtcaatggggggcacttcgtatgattacgactgcacctgttatagcacctttgaaggtgcccccgcaaccttaaaaacggcttggcaatcttaaagctacatgttgcttcagcaaccggtaatttatcgaggagaaaataaaggttgctgctaaggatttcctgatcaaaaccagttcgccagttaaaagcatagtaaccaaaccgtagctgtttcaagcaatatccactaagccgtgctaaagcacggagaagctctggattttatcatgtagttttgattctaggtttgattctaagttaatttatcttaaatgtgcctaccagttctacccgaggttctttggttagagcgaagtatcattaaatttcagcagttagtgcttctgtctttattcgggtttgctaccaagttccgaaaccatgaaagcatgcactgccaactatctcaagccctcacgcgagcatgtactggtcactcgctatgccttagctatcttgcaataatatgcagccaacgtcaaggcttgaatgcggcggtaacggtacgtatgcacgtgcagaatggttgaaacgagaccagcatcgtttgaagacccacatctttaaattgaagtcgtgggtgttcgtgggtgtccttccatgacttcgacaccgatgtagcatcgttgaacatacatgtactgcaaacacaactgcagttatgtctggagtcatggtcgagcgacatccgatcgatcgtgtcacgcgaatgtcgaccctaaaagactcaagcaacacgccgctggataatatattatccaagcgtttataaagttaacgggtacgttccgatacgttaatgattcgttcgtttataaccgatagcggatcatgcatttttatagtgatttgcacctccagtcgtatcgccctaacaactctggataaaatccagagaacaccatagattaggctccagctatataagcaacgctttattatctttaaaaaaatccgtgccaatgaagtaatcgcaatacattaaaaaaaacacgcacacgcagtatagggcactgcctactatctatcatcaatccctcaacaattcgagtttcctccaccatctcctatcccggcggcagtcctctctcttaataaaaactaaacccttcctaaaactttaccgaaatgactcattacgagcttccaacttcaacttggtgtgacccaccctctcaatcggtcgcacgatcgctcctcctacacccgattgcttgtcaagacacccgtcacttcatcagttattccgcaatttcccttcaacccctcaagccctaggctcagcctctctcgctctctcgatgcccttcccggccagcaagtactcgcgctacaagcgcgccaccgccttctccctcgactggctgctgcgagctcgtgggcgcggccacagctccggccagcgcctgcgcctcagcacgctgaacgtcgtcgtgcaggagatcgccgccaacatctcgtcgctcacgcccaagctgctgcaagagctgcccaaggcgctggcggcctgccaatgcgccatcacgctgcgcgaacacgtcgccaccttcttcgccgaggacgacgagggccagcgcagccaccagcacttcctgcagctgctcaagggctggcaccagacgctcatgcgggcggacgcgcagcctgaggacgaggacgcgctgctggagcttgagagcaccaagctggccatggaggaggagagcggcaagttcgagaattactagcaagttctgcaggtggacgaggactacttccccgacgaagggactctggtcgtcgagccggacgcccccaaggccgtgaaagtcgacagacagcgcgtgtttgaagagacttcgccgaagacctcaagctggagatggtgtatttctttatggagttggatgagttgatggagggggtcaggaaggtcttcgcggaggtcaagaccgagaaaagatcgctggtggaggccacggtggtggccactctggcgattgacatcgcctcggcactgacagctcaagtgcagctgaagtacccgacaccccgcacggccgagcaaatgtttaacattgtgcggttctcagcgcctgagaagttccggctgtggctgcagggcgtccacctcaagtacctggacgacctcaaagccaacgccatgaacgggagctccatcccccctccagctccgggtatgtttcttgcggacttcatggtcaccgggagcaccttgaacagctttacgacggtgatcccgaccgaccccaagatcaacattaccttacaggaaggagccttcggggagatctacggagaggacgccgcagtacgtgctcagtctcccgaacaacagcaacatcaacctgtttctcatgcagcaactcgagttattgtacaacacactcgtcgacttgcgcgttgccgggtacaagccgttccgacccatggaggccttcctggtactgatggacaagtacttcacgacgcgcgtgatcacggttccagtagtgtttgcgtgcatctgctgggtcaagtcggtgggctgtctccaagggcaaaggggtctcggtcgcaatacgagcattgcgatccgacactccaagccgttattggacagcgtcgaggctacccaggcgaagaaagctgtactggagatcgccaatgttttgctggagaaatgctgggcgaagaccaagcaagacgagcagttccaccacttggcccgcgccaacccgctgtacgcaggccatacgctgctgaatcaccatttggagtatatgcagatgtcaagcgcgatcctgctttcaactggcagattccgagcgtttggtcacttgtacaatgcgctggtgaaggaacggtatctcgagcgtatcccgttcttcgacgacatactggatatctatgacgaagtcatgttcacgccatctcgggactctgcgaagcccagcatgtactatcgtacgtacctcatgagtgatcaagtgagagcgagcgcactggatgcgatatacagcggcaaggcgttgctacgaggaagagaagggtacagaaagcggaaagaaagcatcgctggtagcggcatccttagcgacatgtccaagatataccgcttgatgatagaggacgacaagtccttcctcaagcactcgtcatgggcgagcatgctggatcacgccgcgcaaacttgctccgaggagatgttccagacacggatcttgtcacgcgacctgttgaagctgagtaacagcctcacggacgtgttcaacgagatgtgcgatgcgttggaccaacgtgattgctacgaagaaatcattgcagccccgagatccggtgagacccgcgaacagcgcctgaaccacgctctggaggatccgtgatgaagtttacgatgccgttcttcgacgcgctgcgcccgaatggaactatcgacatgagtcagattcccggcgagtttccgcctaatgcaacgatgaatcctttcgttgtgagggggctgtgccagagcgtggcagctgtgatcaaggcccgatacgccacacccccgttgatctgcaatgagaagttcttcacgttccctgcccgtccagatttcgtgagccaagagtatggaactgcaccgatatcggagagtactatgggcccctgtcatcgagagaagtttgccattttgatggcgaagatgagagacaccaagggggcgctacctgacaacttcctacgctacatgaagcaggcgatcaaagaggatccatcactactcagggccggcgtgaagagtggcgagctgcgcacgctgtttcatcaggcagctgctggaccggctcacaacgcagaattggtggagtggatgatttaaatgggggcactcaagcttcagccgacattgcactgccggaggggggctgagaaacctcgattagtagatgccgatgtggagttgccgaacgccatgacactgcactgtgctgcggccgcgggatatgacgacatcgtccggattattctcgaggctgatcacaagtatgatctgaacacgctgacgttcgacaccaaagagaccctagcgcacctggctgtcaagaatgggcatgaaaacgtgttgaacgtccttcggcagtttggcgcggatctccgtgttcgagacggcgcaggaaggcgtgtgtgtgacgtcacatcggatccgaactgggcgcggaaactcgcgaaagacgcctcaggttactttgacgatagtacggatggagataagaggcgcaacgctctattacatcgccaatccaagcagccagcgaggcctctcaatgtggagtccgacctgggcgcgaaggagcgtcagaaggagtgtgaaaaggccgtagggaccggatccactggaaagaagaccaagtcgaagaagaagcagaagcagaagaagaaaaagaagggcaagaagaccaagaagaaagacgaaagtgacattggagatgccacgaaagagtcgatcatcgctgccgcggctaccgcgactatggatccaggtgcaggggaaacatcgctatttctgaagcatttgttgaagatggctggctcggacatcaaccaagacgctgatccagaagctgtgccgcagctcgagagtatgctcaacagtatggttgtggcgatgttttctcgtttgagggacccgacgattccggcaagtgaaaaagtcggcgacgtggagcatgcctcctcatttgctgtggcattaatgggtttcgtatcctcgtactcaaatgtggaatgcgttggcagcgggggcaaacttcgaatgtccgttttcgtccatgcccgcaggctattttcctgttgcagaagttctgccgcgttgatcacgctgctgtcacggctcctgagcttgatcctgtgcgtgtcctgtgggatataactccagaattcagcaagtttgtcctgcgcaccactcagataggcgcctccatcgacaggaagcctcaagcgcgcgagattctggatttgctggagaagcgcctgctgaaggtgccatttgaagagcgagagccgatgggctatcgaggcatcgtacggaagtactcaactgctcgtgatggcataggcctcggacaagcatccagccccgccagctttcgcgctttggagtggtacattagcactcatgtggatgatcccaagattgaggctgcagtcgacagactcaacgggcatccattttacttcgacttggtgacgacgtcaagtccagccttcgagaagctcaagcttgcggttactgctgttctaaatggtgtcgtgtgcttcggtggcaacgtgaaacatcttgtttatggtgcttccagccgagacgaagtcgggcgcgttcgcaagctggtgcttcaggcggctggcaaggcaggcgttgtgttttcggatcgaaggtgactacttttcgcacgtacgagccgactgaaggtcccgactggaaactatctgggtatttcgtagagccaatggacaagctcttcaagtctcgcgatatcaccgtcttgacagtatttgcgtgcatttgctggttaaaatccgtcgctgcgttgcaaggagatgaaggactctgtcgtaatacgaagttaacactgaaacacgcggcagacctcacgactaaaatttgatgtgaccgtggctaagggagccgtacaagctgttgacaagaagcttcactgtttttaccagtactatgctacggtcatccgaaggtcgagtcaggattcccatctagcacacacgaacccgatagtggcggggctgatgatgctggatcgccattttgagtacctggatttggcgagcgaactgattgtggtgacgtcgaagttgcatttcttcgggcatctatacaatgcgttggtggtcgaagggtttctcccgcggttgccgtttgtggaggaaatattgaatatttacgaaaaaatgattttcaccccttcccgagctgcggctacgcgtggtgcttactaccgcacgtacttgctgagttcatccttgaaagctactgcactagacgcagcacttcgagacgatcgtacgaacaatgggtctgtcaagacgaagcgaagacccgtgttctttctgaaggatgtatctaagattttccggctgatgactaaaggcgatacgtcgtttttacgggctgggacgtcgaaagctttgctgactatggccacccacatttgcacggaagaattgttcaagactcgggtattgtctcgggacatgctgatacttcacaatgaccttacggacattttctccgaaatgtgcaacgttttgggcgaaattgagacgcggagtgtgaacgacgggcagttcgtgatgttaactgtgattcgagtgttagatgcgatgcagtcgaatggtgaagcggttatgagtgcagtacctggtggtaattcgaatccgtggttgggtgacagggtggatggtgggcgctttcgagcaatttgtacggaactggcggaagtgatcaagtcaaagtttgcgatcgccccagcggacctcgaacgaagatactgcgtgctctcatctttctttgatatcgagaaggcggatgagggagctagtagcaaaatgcatactgccactccagtggctggtcaagctgagcaagtcgagcgggccacggtagaaagccaagctcgaacatcgcaacaaatgcaggaaagaggacgaaaaagtgcaaaaagaaaaacagaaagagcaagaagggcaaggcgaaggggggacaaccgactataacgcctaaagcagcagcaggtgatgacgagcatgcagaaaaatcagaaatactgaaacagctacttgcagcactatgcgcggagatttcagcaaatgacgagcaaatgggcgtttctgtgatggaggactctttgcgacgaattgcggcggctgtgtttactcgtttgagatatacaagcatcccggtacactgcaaggccgaggacgcgcatcacgctagcaaattaatggagagattgcagggtctagttgcggacttttcagctcctgaccagatcaccggctcgtctactcgcatgcgaaacctgctcttctcggaagcttcgcgcgtcatttacttgatgcagaggtttcatcgaacggaccaccccgctgtcacggttcccgccctcactcctgtccgtgagctttgtgacactagtccaagcctcactaactttgtggtgaataccgctcgaattgacgtctcggtcaacaaaaagtcacaagctcaagatcttttggagttgttggaaaagcgattattcgtgctgaagcggctccacaaagtgatcctcttggattttcgagtactagtgcaaacttactcgaaagcacgcgaggatatgggacttgggaaaacgtcgagtccggatactttacgtgctttggagtggtttttgacagatatgagcgacgattacgagctgcagaagactatggacgaaatggacgggcaactcttctactttgacctggtgactaccggagcccaagacgccaccgaactcgaggatatgctaggccctatacctggttttgtgtgctacggagagcgtatcaagcatgtcgtattcggcggacccagagacgaggtgaccataggccggaaggtggttgttgcgttagccgagaacatcggcgtccagttctccgagcgcaactcgttgtattgtgcaaactctcttcgggttggcgagtccgtgttctcggcagatggggtggttcgggacactacgtcgagatgaagcgtcggggtaagatgaaactctggttaccgacgaggatcggtgataaagtttacaggagtgtgtccgtattggccaaaagtttcaaattagcgttatcacgaatgaccgccaacttcagcatactagtgaaattgcacgactcgtttgaaattacgaataaatggaatttcgaaacgaaaacacgcaaatatgagctccacgacacatcaaaccgttgcttctcaaagcatgtcttcatcgccgccaccatgctccaccctcaccaccgtagtgttcatcagcatcgccagggcgttgttgaccgcagcagggctgtccggcccgttgctgaacagggattagataaagtcctcggcctgttgcctcgcgatctgctgcgcaactctttcaggaatcccacctgcaagttggggtgtgtctggcacggggtagtgcagcttcaaccagttttggatctggacatcgcttggcgtcaattccgtgataggcagacgggcgcttcgcacgaagtcgggcgtgaaggcttccggctggtgcacatgtaggaacagcagcacctcgaacttgttcttggagagaagaagcgggttgaagctcgcagggttaagctcgggaaatcgccgcatcagccaagatgccacattcaagtgaccgttgcttactgctcgctcgattccctggacggtgcaaccttccgatcggtttaaaaacagccactccagcgtcttcatgtttcccccagcagcagcaaggtccatcgcggccgtcgtacacccagccgctgtgttggcatggagccactgcacgatcttgagctggccgcgcttcgcagcaaagtccatcgcgttggagctgcagacttcactccgattggcatgcaaccacttcaccacgtccagatatccgttggctgcagcctcatccatagcagcagtggtgcctccctccgtgcggttcacgtgcagccactgcaccgctgccagcttgccgtttgcggccgcatcgtccatggggtccgtcggagcccacgagtcacgataccgacatcgtttcggtatgatcttccgatggcgatctgagtcgtacacagttactccagtgctgccgttggcgtcttccgcttcaaccagtggcggaggagaagcaggagtaaatagtccgggaatttccgacggctcgacactctggaacagcggcaacatgtcgatacgtccacgcgttgcagcttcgtccatgaagcaatactccgggatcttgctcagccgcgggtagcgctcctggagcctccagctgtccgttgctgatggcactgaccatcgcctgctcgaacgggccgccagccccttcgtcgtgcagatactgcattgccttgatgttgcccttggcagcagggaagcacatgagactcgagagctctctgctgcggcccatctcgttgatggtttgctgtcctgttgggtgatccaccaggaacttgattacatccaaattgccgtggcggaacgcctcactcagtgtgtagcgccactggccgaccaagtcgagatgctgcgggggcggatcgtgctggccggcgatgcggcggatgaggtctaggcggtcggtgccggctagagcatgaatggcggcgccggcgccagcccagtcccgctggaagtagccgcagtccagcttccactcgatcatggcaggcgtagcgcagaagtcggcgtagtccagaacgcacctgcctttgggtagcagggacgcgcagaattccaagtctccggcgtgcatggcagccttgatcatccattcgcgcacctggtccgtcatggtaccgagtggcgcgtgctggtgtaaccagtgagccgtttcgagctgcttgacctgcagcgcgtcttggacaactgtggggtaccattcaaccttgacacctggacttgtgttggccaggaactgcagcagggccaagtcgcccttgtgcacagcctgggacacgacgtccgagggcacaacggggtcttgaaagtggtcaaacagccactgcagcaactccgtgtcactgcgctccacagcgacatgagcgacctctgcgaactgccagcggctgtaaaactcgtcactacgcaggaagcgggtgagcgtccagccgtcagtggaagcagaagcggccgagtcgtgctgcgtcggacagctgcagccccagatccagtccagcaacgtcgtggagcggaagctgcaggcggcgctgagcgacagctcgggcgacggcccgatgaactgcgagatgagcggccccacctgcgtcagggcgtcggcgccgcgctcgtttcgcagcacaatcgtcacgctctgcagagtgaacggcatcggtgcagcaaggagcgaaggaggaagcagtgaggctgagccctttttcttgaagtgacgtacccaaccaggccgctgattggccgaggcaggggggtcacttcaacataccaaaagagaaggtgctccatgtatctgtcggtgagcactcgtgacggcaacgattgttagcgtcacatctattgaagcagttacagtgcctcattagcgcccgcaagacacagtaagcttagtcccaaagctccgcactgagttcgttggggcgctgttggtataactgtaactgaaaacaaaaagcttttaagcttatatcacgaagttaactataagaattttgtagacctttagcagtagctgttcacggtgcgtatgatttgacagcctcttgaaacatgtgtgtcaaagtaactttcgacgtgaatgaacatcgagagtctaggttttagttcaagcactatctcgcagcgtttccaaaccggttctacgcacacgtgttatagatggaatatccacaagatcgtccgccttcagcgatgacgaacgtaatcgtgtagcaaagcagaagctgccgggaatacgaagatcgccattcttttgctcaaagaccggcgaaagagtacaaaataacataaaaatagactgatccatttcgtatttgcgttaggggggggggtctgattgacgctgtagtccatcacggatatgattgattgttgtggatggatgtgacacaacatcctaacggcaatatcccgatcaaccttcgttgccgacaaatcacaattcaaaaaaggtcgagttggcaacgatgccgcaatttcctgtgaacaaatacgttcggtacaagcgggccacgtccttctttctggactagctgctgcaggtccgaggtggcggacgcgacgcgactaagatcgtacggctgaaaacactcacacaggttgtggaggacttagtgtagtaggtcgaacttcaaaaacgcgaacacagtcgggggaagttggcacttccttcagttgtctgtcgagtgcattgcgcttgccggctttgagataaaaccaaaagtgagaaactaaaacatgcatgccgactagctgctctacatcgccgccaccagcgtccaagtggtggcgctcttcacgaccttcagtaagagctccctactgcaacttgcaccttgcacctcgcaccagcttgagttaacgaacgcacgcacgatgtgcacttgagcacgccaagccagcactcgctggttgtggcgcccaagttcaacaccgctgcatactcggccacagcgctggctgagcaacagcactcgctgagcaatagcacacatggctgactgcaaccacatgctggcagcagcacgctgcccagcatcgccgccgtactcgactgcactgcgtggtcgtggttgggctttcatgccgccacccactacacttagcagccaaaccgtccacattagctcccacactcctgaaagacttccccaaggctctcgcagcctgtcaatgcgctatcacgttgcgagaacgtgtggccgcctacttcccagatgatgaacacggacaccagcacttcttagggtcgctaaggagctggctcgataccttgaagggggtggttgtcaagccacgacagccacatcaagatgacggaactgctgacgagcaggacggtgccaagtacgagaactactacgaggcgcttggggtggacgcggactatttccctgatgcggagacattcgtggtagagccttctacctcgaaatcattcaaggccgatcaccagtagttgccggaggaggcgtttgaggaggatatgaggctggaagtggcatatttatttatcgaactcgaggaactcgcgcatgaagtcttcaatgcttacgataacgtcaagaagcaacaatgcaccatggtggaagcgacggtggtagccaagctggctatggacgttatcattattttgatcgcgactttgcagttacggtacccatcacttaatacgggcttggatttcttggatgtcgttatggaaaagacgctgaaagcatatccgctcgtatggaacaggcctaccggactactcgcagcaatctccaaaaggacgcggtattcacgttcgtcccgggtatgtttctgctagatttcgcaagtgtcggtatcacgctggaagcgttcgcgagaataacccctccaaatcttcagtacacgatagttgttccacgtggattttacggtgaaagctacggcgaaggacggactccacactacgtgctcccagatctcagcaacatgaacatggtgacgtttctacggcagcaactgccggagttgtacaattcgctcctctatacaaaggtcacgactttcaagtcgttcgagccaactgaagatcctgattggaggctatcgggacctttcatcagcgtcatggacaagttctttaagtcctgcgaggtcacagcttcgaccgtgtttgtgtgcatttgctggctgaagtcagtcgcggcgttgcaaggagacggaggccttaagaagtacacgagctggacactgaagcactcggcggacatcacgactaaatttgacgtggcagtggctacaggacaggggtcggacaatacagtatgaaattgtattgcgaggccaaagctgcagtagtaataacggcaatatgagggcaaccaataataataattggtacaatttaagtatattgtactattcgtgacatgagctattcattgccaaaatgtgacaggaaggccgcaaacttcgcgcgaactttacccaaacgtcccatggctgatatcgaactattactgaggtgtcaggccaacctatacagaaaatacaggtggaggctgatgacgattacaatagccttgtactgtttccaggaccgttttgggaagtgttgctgtccggcaaagtgctattgagtatacaccgcttcctccacaaaagtctcgcaacccaaggccaaggctgtgtcctcgacccgaaaaatagagattataatagtttattgtagcattttcatcatttatgaacgcccaaccccagaattcatagtatttgatattgtgttgctattattggggcaatatcatattgtattggtttcatgatcttccaataataaataattgtagtgggacaataccataataattgttttgctattattttttccgacccctgctacaggagcaatcgaagctgtcgacaaggaacttcatgagttcttcacgttttacttggtgtttatgggagtatcgaactcccattcccatctagcccataccaaccccatactcgcggggctcatgatgctggaactgagtctcgcgcaccgaactggtgcgtcctacacgttgcgagcgtctcgcatgattccacaacgactcgctggagctgttttttttatttcatacagcgcggggtgattactggttgctgcgagtcgtattgtgaaggcgtgtccaccatttcgaatatctgggtttggcaagtgaacttgttgtggtaaccctgaagttttatgccttcgctcacctatacaatgcgctcgtgaccgagggctttctacgccaattaccgtttgtcgaggaaatattgggtatttacgagaatatgctgtttactccgtccagagctgccgctcatattatcgcacctacctcttaagtttgagtttgaaagcgacggcgctagatgcagtacttcgtgggaaacgtggcaatgtcgggagtgatatgaggaaggcgcggacggtgttcttgctgtcagatgtatcgaaaatattccggctgatggtaaaaggagacagctcggttttggggggtctgtcatcgactggtctgctcactagtgctgcaaaaacttgctcgaaggaattattcgagagtcgagtgttgtctcgtgacattgtgattctccatgatgatctcacggatatcttcacggagatgtgtgacgtgttgggcaaagggccgacacggggtgggagggacgagaatttcgtgatgacgtctgtgattcgggctttagatgctctgcagccaaacggggagctgcttgtcagcgataagtggtgggcgcgtcaaagaagtctgcaagaagctagcagcagtggttgaagcgaagtttggagcctccgcggaggaactggaacaaaagtactgcgtgttctcgtctttgctgaacgaagagaagccagtcactggagatcatcgaccaaaaagccatcctacggtgatcggtcttgctgaacaactccagcggatagcggtaggaaccccgagctcgaacacacaaagaaaaagaaaaaaagagaaacaaaaagaataagaagggcaaagtgaagcgagatcaagcatcctcagcgccaagagcagtagcgggtggtggtgacgaggttgcagaactatcaccagttctgaagcagcttctggtagcagtgggtgtggatacggcagcaaatcaggatcaacctggcgtatcaacaatggaggaattactgcggcaaactgtggcggctgcgtttactcgtttgagagatcctggtattcctgtgcagttcaaaggtgtcgacgtgcaacatgccactgcattgatggagagattgcaggggttagctgcggaattttccactccggccaaggaaacaagctcctctactcgcatgcgaaacctaatcttctcggaggcttcgcgcgtcatctacttgatgcagaggtttcatcgaacgctatcaaggttcctcctctcgctcctgtccgtgacttttgtgacacgagtgaaagcttcacaatgtttttggcggctactgctcaaattagcgtctcgatcggcaagaatacggctcggcacgattcaaagagaagacgcccaacgatgaccgcgagcgcgtgtttcacgagctgttcgacctgctgaaaaacagcgatggaccactaaatgagaacgatctcggctacgtcaagggtgcgatcaaggaggaccctgagcttttggggatggtttcgagccgcaatgcatcgggcgattgcgaagcatcgatatatcacctttgtacgctacttcaccatgccgctgctggccctgcacacgacattgacctggatgattcagttgggggcgcttacgatgcagccaagaccggcattttcagcaagcgatgatgcaagtgctccgaatgtactggccaacactttggccgtgcacagcgcagcaatggcgggccatgcagaaatcgttcaacttcttctggaagctgacagcatggtggacttgaacacagcgacgttccttacaaaagaaacacttgctcacttggccgttaaccacgggcatcggcgtgtgctcgaaaccctctgcttgttcaagattgatatctgcgctaaggacggcaacggaaaacgtgtatgcgatgtgacagccgatcgtgagtggtcacgtgacatcgcagtgaccatcgtcaagatcgagcaaggtcgcgcgaaagctaaacagcgcgttgcgcctcgtaccaacttccatcattctttttcagctgagcaaccgcacaagttagtggtcgcgcggcgcgatgaggagcggcggcttgcatttgagaaaatgagtttaaacgatggggtggggtcgacgaagaagaagatcaaaaaaggcaagaaacgaaagtgaagcgctggagatcagcgattgtaccagcaagtaacaatctacgtttatgctattggaaagtttttgatgtttggggactttgcgattagaaataaatcaacgattctttacgcaagaatttgctaacatggtccgctccgtgacggcgatcctcgcacggctgctaactttactgcagcctgctactagcctaacgatgccaggttggttcagcttttgcatataccacagcgcatccatccgcttacaccatcgtgacattgtgcaactgcatgcagagacttgtgggactgagaagcagaccgcaggctacatcgaccaaccgaatcgagcggatacccactacttctactggtatttcgagtcgcgcagcaagcctagcaccgacccgttgatcgtgtggattccagggggcccgggtgagggcggcacctacggactgttgggtgagaatgggccgtgcaccgtgaatgatgatctctcaaccaaggttaacccacattcgtggacggcggtggcgaacgtggtgtgggtcgatctcccggggaatgccgggttcagctactcaactaccgcagaagacgatgaatccaccgacgaacgcgtggacgagagcatcttttggttccttcaggaatttctgaagaaacaccccgagcttcaggggcgagcattattcttggttggcgagagttacggcggacactttgtgtcgtcagcagcacacttcatcttggccaagcagcgtgagtctgtgtccgcagaatcaatcgccattaaccttcagggcatcgcgatcggtaacggactcgtcgatcctgtggaggttttcacgcatttcgtgaacatgaccagtaacgtgtacaacatcacgctagtgggtgaacctcaattggcagcaatggaatctgcacttgcacattgccgagatctgatgacccgttgtcaaagcaacacgtcgatgtgtggagtagctggactgtactgtcagcagacgcagcttctcccgctgctgcgagctcatcggaatccgtacgacatccgccagaagtgtcaaacttccctctcgaatgcgaccaagtgtatgctcaaggtaccgaagataaaggcgtatttggacttacccaaagtccgagagttcctcggcgtccacccaagccgcactgagtggatcctgttgaaccgcactatcaacgccgccttcttctccgcgccaagcttctcggggtatttgtccatgggtggcaaactggccaacctgctaaattctggcctgcgcgtgttgctgtacgctggagacgccgacattctctgcaacatttacgctaccgaggctactgcgaaaaagctgaaatggagtggagccacaaatttcaactccgcaccagagcgtgcatacacgacctcgtcaggttttggcatcctgcagtcgtattcacacttgacattcgtgaaggttcacaacgccggccatgcagtcccgggagaccaacccgagctcgcactcgatatgatcaccaagtttgtccacaacgaaacattctaaaccggaggtacatgtagcaccctgatttatatccacccctaataaaggccattcgagtcatatccgtgtcatgcgcattgattgatcctttggatcgcagcgagcaatatcgttccctgcaggcaagtaggtacaagcgcgtcgcggccttcttcctggactggctgctggacgcgcaggtctggggcgtttcgcggggcagcgcctcaagctctcggcgctcagcgacgtggtgcgcgacatcgcagcggagccctcgacgctcactccgaagctgctgaacgcgctgcccaaggcactcgcagcctgccaatgctccatcacattacgggagcacgtggccaagttcgtctctgaagatgacgcgggtcaaagggggcacctccacttccttcaattgctgaggaattgacactcgacgctgaaaaaagtgtcatttccggaagcaaatgtacccatttccggtgctctggtgctctggagcaggagagtaagaacttcgaaaactattatgacgttagacgaggactatttccctgatgcaggggactttgaggcttctgagacccccaagagccccaaggctgacagagaacgactgtttaacgaggcttttgctgaggatctgaggctggaggcggtttacttcttcttggagctgatggaaggggttttcactatctacgaccaagtgaagaagggaaagcggtccatggtggaggccactgtggcggtgaagctggccatggacacggcatctgcattgacggtggggctgcagttgaagtatccggcactgcaaacggcggaggacgtgggcgtcgtgctgatggataacttaccgaagaacttctggggtcgagctaccgaggccgtgctggagttttggaagaacttcgaagcggatggaacgtacacgtttgtgccggggatgctgatagtggagcgtgctaagtacgctgtgtagcttcacgacgggtattccgacgaaccccatgcatggaatggtactgcgagagggatactttggtgagacgtatggagaggaacggacgccggcgtatgcctttccagacactagcaatatggtcattttgctcctgcaacagctgccgcacctttataatgcgatcctcgacttgaagatggcgaacgggagcaaacttgatacgtccggcgtgacggggccgttcttggggttactgaacgagtactttacgtcacgcaatgttacaatcccgctggtgttcgcgtgcatttgttgggtgagatctgtggcggcactccaaggggatgcaggacttagtcgcaatgttggcgtgacgattaagcactcgacggacctgatggatcgaattaaagccacggcggtgaagcgcgcagtgcagactggtgacatgctagtccgcgtcttggtaaagcaatgcgatgtgcagagccagcaagcgagcaaaagtcaccacttagcgcgcgcaaacccacttatggcaggcttcatgatgctgacgttcgatctccagtatctgcagatggcaagtgatgtcttgacgtgtacaacgcgcttgtggagcaaagatttcttgaaaaaatcccgttcttcgtggaatttataaagatctacgaaaagtggatcttcaccccgacgagagcgcggatgtgcggggcacttacttacctgctcagctcgaattatgccgcagattcgatcaatgagatgtactgcagccgagctttaccggtcaagtacgataggggtcgagcgcaaactctgctcagcgatttctccaagatctaccagctgatgactgcaaacgacaagtcgtttctggggagtgcttcagcgaagactatgctgatcgaggttgctgacacctgcgccgaagaactattcgagactcgcatgctttcgggtgatcttttgacactccacgacgaccttactggcgtattccagcaaatggcagatgagctgagccaacaacggactgaaccggttgaaaacgctgcgatgatgttcgtgatgccgttctttgatgggctgaagcccaatggatcgatggatatgggggcgctaccgggctcgaaccgtagaatgcatgtcggagctgcggctgtcggggtgattaggtcgatgtgcgcaaaggccgctgctgttatccaaggcaaattcgctaccccagcactggtttgcgaccagaagtacttcacattcccgtctaccccagacttttccacaaacgaatatgggccggttcaaagtaaaagagacactgttgataacgacgacaactacgaagattatgaggatgatgacgacgattacgaggactacgatgatgaagatgaagacagctacgatgtactctccgagcttatggacttgagtagatctgtttagtgaagtgcacgaaagtccccacaaatgcactgaagtactttagtgcatgcacctgtacacaactgatgctggacattagcgcgtgcactaaagtactttagtgcactttcagggagtttcgcgcactgcactaaacaggtctagggatgagctatgacccgctagtcggaagcgactcaaggtacttcaaagccaaaatcaagaggaacccagggctcttgggcatactgtcgatggagtgcctaatgtacatcatgttcggtggctccaacactccccccggcgagacccgcgatgacctctgtacgctacttcatcatgcagctgcaggctctgcgcacgacccgaagctcgtcgagtggatgatccaccagggagcacttgccaatcagccgacgcagttctgtcgaatggggaacgcgagttggcaaagaaacctgccagtcccaaagaatgtcatgccaaacacgatggccgtgcacagtgcagcgatcgcgggtcacgaggacattgttcggatcctactggaggctgacaatatgatcgacctgaacacacccacgttccactccaaggagacgatcactcacttggctgtcaagtagggccaccggagcatgttcaatatgctccgcgcgttcggagccgacatctgcatcagggacggcaatggcaaacgggtgagcgacgtgacgtccgaccgcaagtggtcccgcgaaatcgccgcggagattgccgagattgagcaaggtcgagcgagaactgatagcgcgaagaaccgagatgcgatgcttcgtcatcagagcatgcttcgtgcggagagagtgcgcaaatcggtcgctgctcagcgtgatgaagagtgccaacgtcagtttgtaaatgattcaacggataatgtagcaagttccaagaagaagaagagcaagaagaaaggcaaaaaggggaagaagggtaaacctaaagggggtgatgcagtctcagctgctactccggcgccggaggagccgcaggagaagtctcaagtttgcttaaggatctactgctatgaactgattctgaagcaggggacggcaattccgatgaagtggcctcgctcaaacactcgttcgaagacacgatggcttctttcacgcgcttacgcgaccccagcatccctgttgacgacaaaagtgacgacggggagcgagtctgcagcgccgtgaagaagctgcagaccctcgacgaggcgtgcgcccaccccaaccgaatgaacacgacggatcgccgcatccgcacttcggtggcctccgaggcagcgcagagcacgcacctgatgcagaagttccatcgcgtcgaccacgccgccatcacagtgcctgcgctctcttcagtccgcaagcagtgcgatacgacaccagacttcgtccactttgtgctccgtacggcgcagctcttcgtctccgtggacaggaagccgcaggctcgtgaggttttggatgtactggagaagcgcctgttgaagacctcattcgcccagcgagagccgccgcagtttcgagagctggtggagacctactccaccgcacgcagcgctatattgcttgggacgcacctcgagcaccgagcgctcgaatggtccgtggagagcgtcaagctgcagacgaagcaggacaagatggtgagccagcccttctacttcgagtactcgaccgcggactcataccgctcctacccctaccagttcgagaacgccatcgacgcagcccctgatctgagtggcgtcgtgtgcttcggcaagcgcgcgttgcacgtcgtgtacggcggcaacagccaggacgacgtggcgcgaatgcgtgagctggtactgcaggtggctgatcaaaccggcgtcaagtttactacgagtcgtgtctgcgcttcggagactttgtcttctccgccgccggcgttgtccgcgcaacttaaacgcgccggaaaggcaacactacaccttcaacgttgcgtcaatccagctggtttcctctcattggttcgtcactgtaccacaagtatggtacacaaagccaaaaaagctgccaacaaagcaccgctccattctcgaaatttctcctgctggacgacgctccaagggtgacgtggcaagctgtccgttgccgctgctgctgtagacgcacgccagctggcgccgatataacgaagaggagaagacgacgaggccgcttaccactcgccattcctcaattttccatccacccaacggatccgacactaaaaatcaagaatccatccaacaggattaattgagcgatcatgacggataattcgacgcgcgtgcgtgtgcgtgtgcgcctgctggtggcgctgctgttcttgctgagcctctcgtccgtgctggccatggacccgagcaaggactactacaaggtgctgggcgtgggcaagtcgttctcggaccgggagctgaaaaagtcgtaccggcagctggcgctcaagttccacccggacaaggccgagaacgccgaggacaaggagaaggccaaggagaagttcgtcgaagtgtccgaggcctacgaggtgctgtccgacccggagaagcgcaaggagtacgacgacgcgcggcgcttcggcgcggcggggggtcccaacggcggcttccccgggggattcggcggtcagggaggtagacgccgctccacggacgagaacatggcttcattcacgaaaatgttcgagaatatcttcggtcacggctttggaggagctggtgccggcgctggaggctttggtggagggttccctggaggtgcaggcggttttggaggcatgggtggaatggggggaatgggtgggatgcccaacgagttccagttcagcggcatggacggcttcggtcacgcgcagcgtccgggtgcaggtggcgcgtaccgtggcaaccgccaggctcggcagccgacgacgttgttcgcgtcggattcgcccgtgcggtcgctgtccgagaagaagttcccgggcaaggaggccaacaacgagtggctggtgcagttctactccatggacgtccccagcgccgagttccgtggcaagtacgagaacattgcaagggacctcgaggggaaagtgcgcgtgggtgctgtgaactgtgacaagtacgaggacttctgtcgctccaaggggatcaagacccacccgtcctttgcgtacgtgtgggacggacagctgaccaagtacgagggcgcgctggacgagtaccaggtgtacaactttgccatcgagaagcacatcgtgcggctgcagcggatgcgcgagtctggcgagctggagaagctgcacgcgggcaacgcggccaaaatctgcaacgtgggcaagcacgcgacgtcgggcgcgtcctctctgtgcgcggtgttcgtgctctcgggagacaagaagaagcgcgagcaggagatgaaggtggcgcagcaggtggcggccaagttccgccactccaagagcatgaaattcgcgtacgtggactggaaggcgcagcagcgcacggtgcggaagctggtggagacggcagtcggccacaaccacaggcgccaggacccgggactgctcatcatccgcaccaagcgcggcaagacgcgtgtcggcgtgcactcgctggacgccgacttcagcgcagatgcgttatcagccactatggagcgcgcggtgggcggcgatctgtcgctggcgaccgtgcacggacctgtgaatttccgctgagggagagtaacgtagttgttggcattaagctccctgattaattcatttgttagagttcctacactcccccatgaagaaccacgaaatacttcctccggcattacgcagcattttttccctggtattatttcaacattatcaacaactaatgattttattttatttttgatatttttaaaactaagagtgaaactgaaaaaaatagttgctgcaagctagttcttgcttttgggattatttgtcggcgtaaggctcttcacagagaaaatctgcagcttcaggtctcgtcctcggtattcaatgtcgaactggtcgcaggcatctgtaaaacacgcatggacaatctccacgccagggaacttcttcgtgtggcagatctccgcaataaactgactttttctagcgaagttgaccaccacgactcggtccaccttcattcgttctttgagctgctttgcttgcttagcagcagccgtgatctccgatctcttgagtagattgaatgatagactttttatgggctcgtatactgatcgggtcggtggatttggtcgggcttcgcctgtgtgagctcctcgtttgcaccgccaatttcgcttcgctcatggcgggcaaggcgtcggtaaaaagatagtaactcatacttagacatacctactccggcccacgcgccgactgttgaagtgcaccgctaagtacggttccgttccgtacctgaaccgttggcacggttcaccctgaaccgtcctggaacgcttcctattggctaatcttcgggatggtcaacttggttggttcgactgtgtagcaagcggtgattgcacatgcagacacaagaggacaacaagaaggaggagaggggagtagagttgagaaggacaagtaggacaactttggtaactttaatcaactcacttcggcatttgccatcaacaacacaggcgttcctcaataggttaacagccgcaaggacgctcgccgcaagaacgctcgaccaagaacgctacgctcaagacatgacgaccaagcgcgctgaagtcctcttgggcagtgggaactacttccactgggagtacaacatgcgcatgacgctggcccggaaggggctgcttgcgcatttggaggtcgtcaaggcggagaatgagatcacggaggcgtggctcgtgaacgacgcgaaggcgttgggcatcatcgcgcagggtgtggagatccagcaccagacgaagatccgttccgcgacgcgtgccatgcaggcgtggaacactctgagggggtactacaaccataccacgctgcacaaccgtgtcgccatgacccggcgtctggacgagttcaagatggactctggaacgtcgatggccaagcatctggacgcgttcgacgaactgatcgttgggctgcagacgatgtgagaaccggtcgacgtggcacggcagctcgtggtgctgctgagtagcctaccgtcggagtacgagctgatcgcgtccatcctggagaacgccaaggatgtcacgttgaacgacgtgaaggagaagctgttgaaggagtttgaacggctcgagaagaaggattccactacggagaaagcgtcccgcgccaacgggaacgctggccggttcaagggcggtcgtggaaacggtcgcaaggggaacggtccgaagaagaacggtgccttcaagggcaagtgctgtcagttcgaccaggcgggccacacgaagcgggactgcccgggcaagaacggtagcgctgggaacgacaccatgttcgccgtgggtgaggaacgcctcgccgggtgggtgatcgatagcggggcgtcatcccacatgaccccgcatcgtgatgacctctttgaaatggatgtaacggtcactggcatgcaggtgactatcgccgacggaaagcagctgccggccgtcgggcgacgaacggtcaagctgacggggatggacgggaaacgcatcacaatgaaggacgtgttgtacattccgggactcaacagacggttgctgtcggtagggaagcttgcggaacgcggtctgagcgttgagttccagcgttcctcgtgtgtcatctgggggaacactagcgcggtcgcgatgggcaagaagattggcaaggcgtatgtgctcgactgcgagcaggagtcgacacggttcgtggaatacgccggggctgacagtcagtgggagctttggcacgctcgcatggggcacccgagcgagaacggtatggccaagactcagcgtgctacgaacggtttgccaaccgtggggcgtagcatcaagaccttgtgtggcggatgcatgcaggggaagcagaccgtgacatcgttcccggcacggtcgacgacgaagacatcgcgtgtgttggaactagtccacacggatgtgatggggccgatgagaacggtctccaagggtggtgcgaagtacgtgctgacgttcgtggacgactactcaaggtatgtcgtggcgtacttcatgaagaagaagagcgaagtggccgacaagctgaaggagttcaaggcgttctacgagaaccaatggggagaacgcttgaagtgcctgcgctcggacaatggaacggagttcgtgaacgagacggtcacggatctctgtcgccggaacggtatcatgcatcagcgaacggtgccctacagcccgcagcagaacggagttgcgggacgcatgaaccggacgatcatggagaaggcacgcagtatgttacactacaagggcgtgtcgacggaatggtgggcggaggctgtgagcacggcggtgtacctgatcaaccgttccacgaacacggaacgctcggatgtgacgccgtacgaggtcagcttcaaggtgaagccacggatggatcacctgcgtgtgttcggctcaccggggtacgctcacattgacaatgcgaagaggacgaagctcgagcccaagagctttaggtgcatgttcctcgggtatgcggagaacgctaaggggtaccgtgtatacgacgtggatgcgtccaaggtcaaggtgtcacggtcggtcaagctggacgagcgcgaggtgagcagaatctatgatacgcactcgccgcagcatggaacggtcatccatgtgaccaaggacggagatgtgccagccgttcctatcgaggtggaacggcaaccggtcgaggacgaacccatggaagctgttgaggaacccgttccagacgtcgagatggatgaggctgagccagagcaggaggtactgcggctgccggcaccggaacgcccagctgccactggattggagttgactgcgtaccgacctccacctcaagcgttccaggacgaccacctggtgttccaccccgagccggaacggacaagaagatcccgtgaaccggtgtttctcttggggaacggtgacgatgaagatggcgaggaacgcaagtcggaagggagtgatgggccgccgtccccgaagcgacccaggatcgacgaggacggtctcattgcggaggctgtattggcgtacgtggccaggatcgacgatggaacggatgtcccggcaacgtatgcgcaggccattgctagcgaagacgcagatgcctggcgggatgcaatggacacggagttgctctcgcacgaacggaacgtggacgctggtacgacgtggaacgcatacgcgtacgattggtagccggtgggtgtttgccaagaagcgtgaccagaacggtcgcgtgatccggtacaaggcacggttggttgcgaagggtttcaagcagaagtacggtgtcgacttttcgagacgtactccccggtcgcgaacatgaattcgatccgggtcgtgctggcagcgtgcgtggcagacgcatacgtgatggagcagttggacgcggacacagcgttcctgaacagtgagctgacggaccgtgtgtacatggaggtgccatttggtattgagaacactgcgaactacgtgtgccagctgaacaaggctatctacggcttgaagcaggcggccagtgcgtggaacaagaccatccaccgcatgttcttggggaacggattcaagagctgcggggcggaccagtgtgtctatgtcaagcgttccaggaacggcttcatttacatgtgtctgtacgtcgacgacatgatcatcactgcgaagacgagtggtgaggttcatgaggtgaagaacgcattgtagaacgcgttcaagatgaaggagctcggcacggcgaagttcatcttgggtatggagattgatcacaacaagaacgctcggacgctcatgatcaagcagacgaggtacattgacgatgtggcggaacggttcggccagcggaacgctaagcctgtggacaacccgtgcacgtcgggcctgaagctgactaagacgcagtcgcccggaacagatgaagagcgtactgagatgtagtcacggccgtaccgttccctgatcggatgtctgctttacatcacgacatgcaccagaccggatatcgcgtacgtggtgacccagttgtcgcgattcctggagaaccccggtccgcagcattggcgagctgccattcgcgtgctacgctactagaagacaacccggaagtatggtatcgtgtaccaaggtggcgacgacagcatcacggttgaagcgttcacggacgccgattggggaagcaacattgatgacaggcgttcagtgtcgggagtcatggtgatgatcgggaacgctcccgtagtgttcaagtccaagttccagagaacggttgcgctcagctctgcggaagctgagtacatggcactgagcctgtgcgtgcaggaggtactctggacgcgtgcgatgctgaaggacatgggcaaggaacaagtggacgcgacgcagcttttggtagacaatcaaggagcgatcgcgctggcccagaacgctgggtaccatgctagaacgaagcatgtggacatttgacaccacttcatccgcgagaacgtggaacgcggaacggtcaaggtggactacgtcgagacaaagcagcaactggcggacatgctgacgaaggcgctcgggacgaagacgctcaagcacttgcgggacgctagcgggatcaaggagaaggtcaccgtaccgtaacggtgagtgggagtgttgaagtgcaccgctaagtacggttccgttccatacctgaaccgtcctggaacgcttcctattggctaatcttcgggatggtcaacttggttggttcgactgtgcagcaagcggtgattgcacaagcagacacaagaggacaacaagaaggagaagaggggagtagagttgagaaggacaagtaggacaactttagtaactttaatcaactcacttcggcatttgccatcaacaacacaggcgttcctcaataccgaccattgcagacctccgcttcgctgcggttgcaaacggtctctctgaggcctctctcgacactgtttgatcgttctacaacactacaattttgtataggcgagcccgaccaaatccaccgacccgatcactatacgaccccattaataatctacggattgaatgccagctcaaacgcaaaacccttgggctccccgacagttgcgtatccgtggcgacgccattgggttgaggcccgttcttcagaacatccctcataactggatacagcgcgtggtagaacacaagcaaggaagaaaacccgcgtggctttctctcgagatgagtcgatatggcgtgagagttcatatgacggagtgccgcacacaacagcaagagcgggtcgttggcaggcacaacttcaaaagtagcacgtgctggtagagctgccacgcacatcttcatcaaattagagacgcaactcaatcggagaaaatagttttccatcatgatgcccagagcaagcatagaatagaccagttgactttcgtggatgccgcgattgaatcgaccacaaaagtgctccacgtgacgattcgtcagttctccatcgttcttcagcacatatttaagcgcatcccattgcatgtcgtccaaggcgtgtaacttgctctgcacatggagataagtggggttgtagtgctccaaatactcacgcagagcttccaacttgaaccatctctcccactcgtaccactcgagaagccatttctcgcggtcgatcgtgaagcaaactagcgattcaaatacaccaggggcaccactggaataagcagcaattccagattgaagcgagcgcgtgaaggcatagcggtggccgatatccgcgaaaaagttactcatctgtgactctgaaaagtgctccaccttgataaaactttcatcaacgaaggggcatgggccacctggacggataggattagttttggttttttgttcaaacgggtgggattgttttaatgagatcttgatatatatagaaaaactgttttaaaatttgtcccgtctaaatttgtcccgttgtgatactatacataattgtggtgttgatcgtgcgtctgggcagttttacccggacgcattaaccagttaataacggttttgggcgttggatctcggtgcatctttttaatgcgggataaaacgtgaccaagggcggataaaatggtgtattaaacggagtcgcattaaaccgttttatgtaggttttggaaggctcccattggctgaacgatgccaatcaagcgccttcctcagttgcaaccagaaagtttccttgtctgccacatccaagctgcgcgcgtggaagaagaagcacgtgacgtcggccaactccgagccggtttcaatcgaatccatcacacccagagccagggaagttttcacaaactgaggaggcccacatagtaacaaacatcggcgcctccatattgtactcgacaagccagcacaaacctcctggaacgcgcgaatcgtatcaagcggcaccgagacctcactcgcatgtagggccccagacatctgagacagccgagccttcttgagaacgcgtctttctcctgccgcttcctcttctagagtatcgagactctcctgaagtgagcggacgccaagataggtttcaggctccgtcgccgccccagtaccgtgttgacctcgaggaagaatgaccaatacatgcaggaccgcttcccctatcgacgcccttgatgctgccacttcaccagctgatagtccgacattttgtaacctagctcgcatgtcgtcgagtcgatcgaagtccgtatgtcttctagaccctccgcctcgcgggctgcgagccacctgcccttcgtcccccgagccaaacgtagtcggacgttggtatatgggaacccccactcttcttgcgctgcgatagcctaaagaagggacgctactgtgccatgttgacgcaacgccaccgagaacacgggcagtttttgtccgggcacagcgtagtaaacgctcatagtcggttccgtagccatggccgaccgttccttctcctgacctggaggaagaagtaccaacacgtgcacggctgcatccgccttcaacgtcttctctggattcaccgatgctaccacttcattgaccgctagcccgacagtttgggaccaagctcgcatgtcatcgagtcgctcgaagtcagagatgtcctctagatcctgcacctcactgtgagtgacccacgtgccgtttttcttccgagccaaacgtagtcggaccttggtatatggaaatactagctcttcttgtgccgctatagctcgaaggaggtgctctaccgagtcgggttgccgcatcgacaccgagaacacgggcaccttttgcccgggtacggcgtagtaaatctccatagcccgttctgctacataggttggaagaatgatactaagtctcactcaaaccctcgtaacaaaataaaaataggcaaaaaatagttggcagttgcataatgagttagctttcctttccgtttgcaatcacccaaaagtccttagcagtttgagcacacacagaagcaccagcgagtagagcttagcatcggccttgattgctcatttcaacttccaaccatcttggcacagacgcgtttgtactcaagtaggacgttgggcaagaaaagccgcgggtacagcttgttcagtttcttcgtcgaggtcttcaagttcttctccatagtcctgctggagatgcacttctctcagaacaggggtgcccgcaaatccaaaaatgagagagagggcatgacgatcgattggccaagcgaggatgatctcgaaggttgcgtcttgtctccgtccgttggtgcatggtttgctgcgataacactcaggaacgcagccttattcgcaattggcactttaatcgatcgatcgacccgcgcgttgtggtgtttccggatgatatcaacgaacgcttcttcgtccgcgcccaattcgaggtactcgacactgcgattcttcttcagcatgtcctggagagccttcgcctctcgcgcagagctgcgcgcgtttagactcggatacacacgcaacttgcgcacacgctggacgaaaggattgctcatgtcacttaacccctctgaccccgtattctgtatcctacagaataaacattattacaggacaaaataccttgcaaacttggcttcaagttcaaaagtcgcatatatctttttgtatggccaacactttacacatcttccattcagattggtgatgtgtagatagacggggattatgcggcgagaatagaaagactaatataaatcccttaaaggtttgaaaattcgtacgaaagccaatatctgccgcgtgtccgccatccactgttctcctcatttcggaaacgatgaacggccccggagaaaagacgttcaagcagctgtggcgtgagctatgcaaggaaggctgtaaggcacgcaagcctaccggcgtggcgaaggatcaccgctatgtgaagccagggatcaagggtcgtctcgacggagcaaaacgtggaatcgacttctttgagggtgggtaaccataaattttgtatataactacgtgtatgctaacgatagatgtatttccccaggtgaggaggctctcatggcgtttgcacgacgatctggtcggcttgaactgctgtgcccagcgctcgaaagtcgacccgggtcccggctgggaagcaagcgtcgtacgccgctattagtcagccagcaccatcgccagctgcccggacgcctaaaccagccgctcgaagtacgagcacgaacacggatgcagcctcgattgctgctgcgtctccacgagccacccctgctgttccaactgcgcatgtctcgctggccccggcatgtacaccaatggcgactccatcgactgtggatggccccagtacggatgctacagaacagggtgatggaatgggtggtgctattccggatgctactgatcaagccgacatggggcatcgtttggccgctaatgccaaccaaccggatgcagtgcgtcgttcagcttctcctgcggatactgagcaagttgatggtgctactgaggactctacagaccaagctggtagggcggaagctactactctggatgtgaccgatcacacggcgtcagcacaagtcattactccggatgctaccgagcaaggtggtgcgaattccggatcctacagagcaaggtggtgcgacccacgacgctattccggatcctactgaagacagatcgaggccgttcgacgatgaagaagccaggagtgagaccgacaatccccccaaccagtgcaaagacttcatcgatctggacgtgtttgacagcgacaacttgatggaagggctgcgcaaggaacgactgtttggaccgactgctgaagatgacgtgaacgttgtagcgacggctgatttgagcgactgcgagtccgatgcgaatgatgaggatgttatgaccgacaacgccatagctccagaagatgtagaagacgtagacgacgtggaaaggaatgaaggtgatctcgacactgggacgtttgatttgactgatgacgatcttcggaccattgcggaaagacgttgggtaacctacgatgaggagcacagcggtaagccggatggtacagaatgtgtggatgtacagttgtgttaattctgtattatccatctttatgatgattcaggaaatctccaagtcgacgccgcaacggactaatacgacgggaaatatggtcccaccggttctgctatcgcctacgcggattccccgttgggcatgttcttctactttctgcccaaggaactctgggttcgtatagctgaagagacagagctctaccgactgcagaatatcccggcaatgacaatctctcgccgagagaagttgctagcccgacaggccaaggatccgcgcgtgagtgtgcctaacgtggaggatatcgaagcagacttgaacaagttcaagcccattcaagcgcatgagatcgtgcacgtcgtagcgctactctttgctagggctgtggcgccaattcgggatggcgtagctcaccactggtgtactgatgaggatggggctattccgcgcggaaccttctcacgcttcatgaaacgccgccgcttcgaagacattatgacgttcctgcacttcaacaacaatgaggacgccggggcccacgctgacaaggcatggaaaattcgaccggtgctgcaagcagtcgagaaaacgtttcgtcgtggatatcggctggggaagtcatctcgttcgatgaaggaatgatgccgaatcgcagcaagttcaaccccatgcgcattttcatgccggacaagcccagcaagtacggcacgaagttctacatgacgtgctgtcctgaaaccgcatactgttctaggtgagttttcctgttctgtattccactacatgtaatccggatcctacagaataaattaatctgtatctatggaattctgtatgcatacagagttgagatttactgcggtgcagacaagacaaagaagaaaaagaagaaggcgcccacagcaacattggggctgggaccaaaggctgtcgtgaggaacatcacgaaagcgctgatcaaccaaccaatgaagcgcttgattgtgacggatagtttctactccacagtgtcgctgagcttgaagctgctccgcatgggcttgtatcacgttggcaccacgagaatcgatcgcttgggctggtgcccgatccatttcacgcaaagcaaacgcccgcagcggatgccaagaggtacctaccgtattgcacaagctcacgactatcctgaactggttgcactgagctggatggacgctaagccggtgaacatgctcgccacggggtgcagcacccacgtgactagcgtgctgaggacggagaaagatggaacgcgcagcacgatgccttgtccgcagctggtcgtggactacggccttggcatgggaggggtcgatgtccacgaccagctacgacttcagcgttacagcatccagcggtgcatatccctgcgcatgtactacaagcagttatttctgtgcctcgtcgacatggctgtcgtcaatggatacgtcgtgcattgctgggtgctcaagaaaagaggagaaaagccacctacccatgctgagtacttgcgccgcttgcacacgcagcttttggcgctgcggacgatcaactttgagacccaccccaacgcagaggacctagtgtctgtaccaatcccacgtcaagaccacacattagcgaacacggacagcttctactctaccgcgaagcagtacaaacaccgacagtacctgtgcaaagtgcgctctacatttgctgactcaaagacgaagtcgttcgagaccagctacttctgtccgcagtgcagcgatgcattcggaggccgcgtaccgctttgtcgtcaagtacgacgaggggagagcgggaacacactgccctgcgctaagatctggcacgacacgtggggtgatggcaacagcatttcagcgagcctgagaaagaagattagattccgtaagcgtaagcgagaacaggaggaagagacgtaagcgtgaggtagcaaggttagtcgtgagctttgcgtatcttgtaactgggttgcatgatggacatcaaggagaaatcgcccagtacctcctcactaatccgttagttaggaactgggcgatttcttcctccgcgctctctcgccgtgagagctgccacgtgctcttcctaccaagaattgggggtctgcgccaaaggtgacaaatttagcaacattggagggtatttatcgctaacaggtattgcgcgtgctctacgctcgccatagccaatagaagatcgctattctgacacatgttggatacattgaggatgttatgtcccacttcgtagctgttttgtccaccaatgcgtaccgatcttgacctcaggatgcgaaagggcttccaacagcaaatctttgacaggtttgaagtatactttaatcaagtttaatgcttattctgtaggatacagaataagagttggggttagaagggttaaggcgctcgagattgtgtctatgctggaccaatcaatgtcgtgctctccaccgcaatcttcctctcgcgtgaagttggtgaaatcgaactccacatccgacctcccacagatggctagcgtccaagctagccttcagtgtggcatcgccatcgtccacctggccacgaggcaacccgaacagcacctcttcggggtgatcagaatccaaaatggcagcaaacgactcgatgtcctcttcacaaagggttttaatccgagcaagcgcgagggattccaacgcggaacacgcacgcgcgcgtttagagaagaaactgtaagcgatccactcccaccactcctccgttgacactcggtcgagaccggggaaggctaataacagagccagatttttagtcgtctgattcacgaccattgccgagcccatggcttgaacatccgcagtttccaactcggggtggcccttcatcaccacagtatcaatctgcagattagtggaagccccagtatccaccgcaggttccgagcagtaattaatctcacgagggcggcgcgtgctgttaaacaaattcgccatcaccttgccgaagacttccgtcgcctcgctgtcatcaccaatacgcctgttgccccactgcgcagtcatcttcacttccgagaaccgcattcagttggaaatcagcttgccgaacctcttcgctatcttcggccactgcgtcatttcctccaagtcggcgatcatgggcttgagtacaaacgtgcatcgcatctctccacaaggcacatcctgcttctccagacgttgccacagctcctggattgtctgttcactgaccagcacattcttcataatcttgggccctccgtccgaggaaattccatgacacggatagaaacaccgcaccggaatcaccacgtcgacgccaggaatatcatcaacctttaaattcgtgtccagcgctgcaatcttagccagcgcgttaacgtattccttcgtgggggttgtacggtggtcgacgccacagaacaggaccaggtcgaagccaacatgatcttcaaagcaagtcctccagtcctggtcctggtccagaatcaggtagtactcggcggggatatccctcgcccacctggcgtcccatttactaccccctaactttaccccaaaataattagagagcagatacttccaggctgcttggtccacgtgggccactgccgccaatagggcgagcgcctcacggacttttttgaactttgctctaaactccatctcgcccgaccactcgtccaggccgtactcgtactcgtcgccgttctcgtcctccgtcatgccgcagcgcatgggcagcttcacctccaggaaatacttttcatccgaccagaactcccactcgcggtccacgcgcttgtacgtgatgaggtccttgagggcgcggcaccacggccgcaagaagccccagcgccgatccatctcgggcttgcgcggggccattctgttggatggacatcaaagacctgaagtgtactctgattggctcggagtgtaaacccctagtcagtgataaaacaagatatgatgttttaggggtttagatcgtaaaagtcgattgaacccactttctgagccctaaaacgattcgagccattgtgttgtttgcactcataaactgccacttctcatattggttaaactgctacgtggtagcaccctgctacttcgcccaacatataacattgctccattggttcattttgatgcaatgtcgcgaacgaccccgccggccgagaagacgaaatcgccaatccgaagcaaggctacgcaattctgggagttgcgctcagagagttggactccgacagattcagctaacgcaaccaccttcttccgagtcttggttactccttctctggacccaccgtgcttgattcgatcccgtacatgtagcacacaacacgaggtatagcagccattgcacgctccaatgcgatggtgtcttgcgagccagtagtcgccaagtcaaagtagaagggcttcgcggccagtccatcgaggaccagcagcaacgcagaatcctccactgtgtctgtcaagtaccattccaacgcggaagctctcagcgtttgacgttgctccgaatcccataccctcgcgtgctgttgagtatatctgcactagagctcgaaaatccaccagcatcactttaggaagacacttcagtgccaccagcctcttttccagtaaattgagaatgtcttgggcctggggcttcttggttggcaaaatcaagttgtgttgggaatgtgaaatatttctcctcgcagacgagcggtggggttgcaaacttggctttaatcacggcagcgaccttcctgctcaattcgcggacgaactctccatctacacggcctatcaatcctctttgcaagtcggcaggcagcgcactcacatccactgagccatcagggtcgacacaatccaaaaggggcagtagcggagtcatcacagcgtcctctagcgcattgttggtgtgagtctggtgaagattccccgattcggcaacacccatcacgccacataaatcagagaatacatcgatgaggtcatcattgagtgtcatcattgagtgtcatcatgtcaagagagagcactcgagtgtcaaacaactccttcgcgcacgtgtctgccgctgcattcagtatgtcacgtgatgaagctcccttcaaaaacgatgtgtcattttcatcaaggagtcgaaatatcttggatgactccacggggcggaggtctttccgatatttactccatttgttcccatgacgaccaatgccttgatacatcgcacttactgacgctggagtagagcccaggctgagaagatacgtgcgatgatacgcaccatgaaccgccgtggcgcgcgagggagtaaaaatcatcgacgcatagagctccaaaatcttttcaaaaaacgggatgcggtcaaggtactcttgccccacgagcgcgttgtagagatgcccaaacgcacggagtataggtgtcgccattacagcggtgcttgcgagatattgaaaatagtagatgttgtccaccatcataaaaccagccatcaacgggtttaaacgcgctgtacaatggtcacgacttgtcgatttcattttggctgcgaactccttcaagatgtcgtggacctctttactcgaagccaacagcgctcctttcgccaccgtggtctccatgatccgtaccaattccctcgagtgcttgaatgacattatcacgttacgactgaggccggcgttcccttgaagcgctgctaccgacttgatccagcaaaggcaagcaaacaccacggggatggtgactttgcgcgagtccagtacccctcgatcacagccaaaaaggagctcgtcaaatttgaccgatcataagtcgaccccgttgccttgcgggcacggatcgtattgtacaggaacgggaactgctgcacaaggaacaaaaccggcttgttcgcatccagaagcatgtactttggcgtgtgctcctctcgatacttttctccgtacttgccaacaccactcgtattaacgtcgcgactgtaattctccgggaaaatgagcgccagattgtgtaacgagatcaccacactcacaaattccgagataaatatgtacggtacgaagcagcatttcccgtcccgttcaaaatgccctcgaacctcatcagcgcacaccgccatcagctccgagaacttttccggattcaggttctcaatcagagcgatcacgtcttacgccgtcttgaaggctgggtagtgcaactggagcgttgctgccttggagttagccatatccatcgccaatttggccacgatcgtctcctccaccatcgagcgttctccacttttcacttgctcgtaaactttaaaaacctcttccaccagctcctccagcttcataaagaggtccaggacctcgaacttcagatccgtagcgaaggcctcgttgaacactcgctcgcgctcctccctggtccgtttagaagcccccttgtccttcaacagcgtctcggtatcggggaaataatctttgtctacctccaaaacgttataataattttcaaacttggagctctccgactgcactgccgcctgttgttgctccgtcaccaccccctgtaagttaataagccacgagcgaagcagctccaggaagtgctggtgacccccgtctccgtctgcgaagaaggacgccacgtgttgccggaacgtgatggcgcattggcaggcggcgagggccttgggcagctcctgcatcagctttggggtgaggatcgaagggttagtagcgatctcctccaccacgaggctgaaggtctccagctgcacgcgcctgccagtgtgtcgcccgcggcctcttgcgcgcagcagccagtccaggaagaaggcggtggcgcgcttgtagcgcgagtacttgctcgcggggaacgacgccatcattcgtatggctagtgcaatacactttgtgcaataaaactgtttgtcacccgctttattaggggtactggcaatattaatcacaatcataacgttagaataaattgaaccgcttcaaggatgcccttcgtgaacattatcattccttcagcacgatgctgtagtagtcccagttcggcttgttttcttcttcatgccaacaacacattggcacttggagaagtcacccctcttgaaaaacacagagaccgcccctctcttgaccacggcgcctcgtggaacttctccttcgtcgttgcaatagaactcaacgacagcagagtcatccactgcaagtgcggcatactcgccgcctcgcgcgaatcgtgaccgatgcccttccattttggcaccattcacgaatatctcaagcccccagtgctggttgccattgatttaaaaagcgattccgccctcacttcgaaaaatatacggtaactcagggcaaatggtggtcgtccggaaggtactcatggcaattccttccatcacttgctgcccccgtcaggaaatccattgtttctggctgcggtctttcgcaacatagacgcagacatactcccaatgaccttcttaacaagttcgcgcagagacttcgggttggaagagaaggaagcacgataggggaagagccactgcgcataatacctcgctgcgaatggagacgagaatccaaactggttgtcgtcctcctcgcagagaatcccagttttcttcaatgagtcttcagaaagcattcgaccagaaactgtcgaatctccctgctgtccagaatgcagtagcatctcgtagttttggctgaagcaccttggcgccgtgttgtggcagctccgtgacaacaagtgtctgatcaactcacactccgacggaaatacggcgtaaaagtcagattcagcagtatcgactaaaatccgcaacgcgccaatgcgtccacaagcctcacgaaccagcaagtcgataaactgttttttcttgaatcgataaggcaagcccatcagtggcaaatccagaaactcccttgcttcttcatcgttcagcaagagatcacgtatctcaaacgtcacgagcgactgcaactctgtggggatcttgactccagaacgtcacgtgtggtttgaacagatgatgaagcagatatgctcggctgccatgacggcgcctccgtgaccagaatattccaaaactccaagtcatcgaaatgttcttcagcgtcgttgagcatgatcacatgctgttggtctttgctgagggttgatttgtgctcaagaatgtctagtccttccaaccgcaactttgtgttaaccgacagcccccctcggcatagtggaacatacatgcagttcaagtgggtgtaccgatgagcatacaggatcaacagcgaggactttcccgaggctgaaggcgctgataagaggacgaatcggttgttatccgcccacaaactcgtgtacactctttccataagttcttcgcgctcgaggtggggcgagtccgtgctcaggccgtgcagataaatctggttaacaaagatcggcgcgttcagctccacttgcacaattagagcttcctccagttttactccaaggccatccagtggagttgccagccgtagaggtttcttgtcttcctccggtacgcgagggtcgtagatattcacctgacttcgattgaccccacgcaactcttgcgagcacttgcgaaggatcttctctagaaagccattcacgacgctagccccatccaacatgacgaactctgtccgcccatcgggaagcacgaaccacacctattgcgccatcgaggcagttttccagcttgtcaaaagtacggcacactcactttctattttttctaagtattttttcctcgtttttgaaacatcacttcaacatgagaatcacagtcggttgcaccatctcggctcctgataccgattccttatctgatcccttcctcctccatttcgtcggctcgactgtaggtcgcacgagcaattcaaaaacggcaaagcggttgtctagggttcctacatggaacgcacgcaacgacactaccctctttcgtgcagaaagttttggccaatcgcatggtgcaaattgttgtccgacaaactgtcttacgttttgacggacaaaatacaatgcagccactggtatactaaaaccaagatgtagccaaaatgcgttgattgcaaaacgcaagacgctttgtcttacggtaggctctctggggctaaatatcgtcttacgaaagagcatgaatcctaaatgatcaatcttgtcttcccgcagtagtctcttgctgcctggctggacgggtgctgcaattaaaaaaaaaagtggcggccaagatgacagacacccagcacgggttgctacggctcgtgcgagatctgcaggcgaaggagacgctgtgttgcgccgacggtgtgtctctcgagcagctaaaccgtcacgtgatgacgcacggtccgttggtgcatcccgttcttggcgacctccctggcttcttcgtcgatgatggccgctttattccatttcggatggccgtccccggtcgctccgtgatcagaccgcaaattatcactttacttatccagtgggtcaagtggggtgtccacggtggaagagtgagcgcgcaaggcaaatattttctggacggcacgctgctccgggcccccgatgtggcctacacacctcgcccagacactagacaagcaacagattcacctgagtggactcttggtggggctccttttgctccgactttcgtggtggaaatcgacaccctcgctgggccgcattcagggctcgaggcccttgacgacaagctgcgacgtgagtatttccctaatggcgttcaattggggtggctcattgatcccgcgaacaaaatcatgtacgagtacaagcgtgatgcccaaggaaataatggactcgttcgacgcgttgacgatgaaacttggagagatctcgatgggggcaccgttttgccaggatttcaactacaagcagtacttctggatatggtgttgagcccccaggtgtctggctcgtcatcggaagaggaggaagaagaggacctggtgtgcccctattcaaactgcagagagcgcttcagaacttctactccaatcgctgcccatattgcgaggcaccaacacgagaaagccctagcgaagtatctggcgcagtaagagccgctagtttgcacgctgaaagaaccgttcgccgcgagttatgtgatttgcaatcgtaagcagcacgcttaaagtgcaatggaaagagtatgatcactggagttggtttctggagtttggggctcgaagataagtcaccaacatacatcaatgtcggggggttaatacggacagccaaactattctcgaaacccgttatttccatcatcatatacaggcacaaatcaattaaacataaatcccaacaaaacgcgaatcgttatcgtatgcattcatgccgctacagcattgcgaaaggctccacgcaccgaaatctcaaattcaccgacgcgcacggagcttgtggaagccttcgagctttcatcatcaaactggaccccaacacctttagcagcctccaccatgctttcacggacttgcttcacctccactttggtggcgccaccgtacaccacccgtttgccttctccgcgaagacacaccactccactcagctcagaaatccccttcaccgctgacttgagttcatcgaactgctcgttcgtcgtatccactgtggtcgtcaactgggtgaaccagtccgtcaagtcctcgcagaagcttagcgctccccagagcggcgtcaaagaaccattccaacgcccgcaacgctttggggctcgacgcacgccccatacccacactatcgcgcgctgcagaggacatctgcacgaccgctcgaaacgccgacggatctcgtttgtcgaagggcgttttcagcagtcgcttctccaacacatctagaatttcacgagcttgaggcttcctgtccatggaaaccaggagttgtgccgtatgtaccacgaacacggtgaacttggtgtcacaattctcctgaacatgtcgaacaagaaggcttgtggtagctaaatcactcaagcgatgaagcttctgcatcatgtgaatagtttcaaacgacttcttggccacgaagacccgtagagaagggtcagtagcgtttaatcggttggggtgggatagaaatttagccaggctctcctctccaacttaatgaccaacttggtggctcgtttggcgtcttccagtttcatgtcgtcgggaatgcttggatctcccaggcgttgaaacaacgccggtgcattatcaaacaagtcctgaagctcggtgtgacgatttgaggaattatctgcatccttttcatccgtcttcgagttcggcgacagtagtagttctttcatttgtcccgaaagttgcgctgattcttcatctggcatcgctgtcggtgaggcaacacctgcactcccgttcgcttcacctctcttcttcgctttagctttttgtttgctgtttgaggaacccgaacgctgatgcgcttcttcgcgctgcggagaaactgattttcgtagctcctgcattaatgagtctcgatgggccatgctcctcatagatcctcgaaccgtcttcctttgcagaatactggacacaattttgcccctccactgctgatccgtagttacatcacatacacgcttcccgttgctatcgcgaagagatagatcggcccctaccgaaacgaccagatcgtacacatcccgatggccatgtttgacagccaaatgtgcaagtgtttcgccaacgtaaaaggttggcgtgtccaggtccagcatgttgtctgcacccacaatcgtgcacacaatgtcatcgtgacctgcaattgcggcactgtgtacagccattgtattcgagagaaccaccccgtcgcacttcacgttccgctgtctagacttcttccgacaatgtagtggctgactacctagcgcccccatttgaatcatccactcgacgaggtgcaaatcgtgactagggctggctgcggcttggtggaacagtgcacagagatcgtcgtcgggatatccaaccgcattgacgtcaatttcgtccgattctttacggagggacaccatggccagcaggtcaggatctttcttgatttcgtctttcaggtgctccaactttctttcatggagtggaccattgcttgtttgcagcaagttcatcagctcgtgaaacacctcctcatggttttccgcctccgtataccccttcgaagacgccgacccatactcatgccggacaaagtccgcctgggtggggtaagtcaagtatttatcctcgcagaagcctgatgacgacgcaaatttggctttgactatggctgaaatctgtctgcatccttcatggagacgctcgcttcccatattctcgttacgagcttccgccggaatcatactggggtccatggtactaccattttgctgcaaggaatccaacagtgccaagacaggcctcaaattctccaacgcgcgatcgaggcgatcattccgagactccccagggaccgcctcaggaagtagatcgaggtacccttcgctcaacacgtcgaacatttcacagagtacatcagcaagatcgccgttgagcgtcaccatgtcccgagagagaacacgcgtctcaactacttccttcgaacaaatatcggcagctttctccagcagatccttcggtgatgcgccttttagaacagaagcgtcatgatgatgaagcaagcgatatatctgggacaaatcctccatgttaggtttcttccggtctcgatacgattcacttccagctgaaagtgtaccttggtatactccacggactccagtcgtactaaaccccgtgctaagcagataagtgcgatagtaagagccacgcaccgccgtagcttgagaaggagtgaatatcatgtgctcgtaaatcctcaatacgtcgtcgaaaaacgggatatgctcgagataaccttcgttcacaagcgcattgtacacgtggccaaacgcacgaaaggccgtcgtcgacaccaccaggtcgtgcgcgatgcgcaaaaactggaagtcgttatccagttcgaagaagggtttaagcgcgcaacctgctgacctcgactggatgccgctaaaacttgtaaaaatctggtcgtagaaccgcctccggtcgtctttgaagccaagcctccataatcccctttattcgcgttgagtgcttaaacgcaaggctcacattgcgaccgagatcagcatttccttgcagcgccacgactgacttcatccaaaaaacgcaagtcatgacagcctcgactgaagccttgcgtgaattgaactagtccaccgtgagcttcataaatgagctcaccaatccaaactgatcgaatccagatccagtgtggttcaccctatccacatacgcgttgtacaacatcggcaactgctgcgcgatcaggatgaccagtctagagctggggtctggtagcacgtactcaggagtccggtcttctccataactttcccccaaagagccctgtagaaacaacctgcctcctttggtcgactccgggaaaaggcccgcaaaagtcttcaacgtacacaaaacgttctcgaagtcaatcagcagcatgcctggaacatgcgtgaaaggcgtcccctcctcaaacttctgccgcgcagcagtgacagcattggaaacacgcttctgaaccctctcgaggatttgctccctgagtagagtgaatacatcttccgccgtcttgagtgctgggtatttcagctgcaactgcgccgtcattgagctaaccgtgttcatggccactttcgccactgtggcctccaccagcgtgtgttgctgcttcttcacttggtcgtagacgtcaaacaccccctccaccagctcctccagctccaagaagtagctcaccagctccagcttcagatcttcagcgaacgcctcctcgaacagcctcttcctgtccgccttggctctcttggggaccccagaggccccaaagcccgtgtcctcgtcagggaagtagtcctcgtccacctgtagaatgtcgtagtagctctcgaacggctctaccggggcctggtacctccatccccttcagagtgtcgagccagctcctcagaagctcgaggaagtgcattgacacgcagcgagggccttgtgaagctcctacagtagtttgggcgtgagactcgacggatccgccgcaatgtccttcacgatgacgcagctgcacgcgcttgcctgtgtgacgtccgtggtcacgcgcgcgtagcagccagtccaggaagaaggcggtggcgcgcttgtagcgcgagtacttggacgcagggaacgacgacatgcgcgctagacttgcttttcatcaagagtgattcatgctctttcgtaagacgatatttagccccagagagcctaccgtaagacaaagcgtcttgcgttttgcaatcaacgcattttggctacatcttggttttagtataccagtggctgcattgtattttgtccgtcaaaacgtaagacagtttgtcggacaacaatttgcaccatgcgattggccaaaactttctgcacgaaagagggtagtgtcgttgcgtgcgttccatgtaggaaccctagacaaccgctttgccgtttttgaattgctcgtgcgacctacagtcgagccgacgaaatggaggaggaagggatcagataaggaatcggtatcaggagccgagatggtgcaaccgactgtgattctcatgttgaagtgatgtttcaaaaacgaggaaaaaatacttagaaaaaatagaaagtgagtgtgccgtacttttgacaagctggaaaactgcctcgatggcgcaataggtgtggttcgtgcttcccgatgggcggacagagttcgtcatgttggatggggctagcgtcgtgaatggctttctagagaagatccttcgcaagtgctcgcaagagttgcgtggggtcaatcgaagtcaggtgaatatctacgaccctcgcgtaccggaggaagacaagaaacctctacggctggcaactccactggatggccttggagtaaaactggaggaagctctaattgtgcaagtggagctgaacgcgccgatctttgttaaccagatttatctgcacggcctgagcacggactcgccccacctcgagcgcgaagaacttatggaaagagtgtacacgagtttgtggacggataacaaccgattcgtcctcttatcagcgccttcagcctcgggaaagtcctcgctgttgatcctgtatgctcatcggtacacccacttgaactgcatgtatgttccactaagccgaggggggctgtcggttaacacaaagttgcggttggaaggactagacatttttgaacaagaatcgagcctcagtgaagaccagcagcatgtgatgccggtcgacggcgcggaagaactgttcgatgacaaggagttttggaatattctgatcacggaggcgccgtcgtggctgccggacaacgtccgctttatcatctctgctgggaccacgcaaagatctggagtcgagagccccgaggagtttcaaactatcgtgacgtttgaaagacgtgatttcttgcttagtgacgaagaagcgagaaagtttttggatttcccaggaatgggtttgcccgatcgattcaagaaagaacaatttgtcgattttctggttcgtgaggcctgttgggcttgttagcgcgctgcggatatcgatcaacgcagccaaagtggaaatcgacgactattcaccgtcagcatctcgattgatgaggcacttgttgtcacacaactgccgtacgagagcgccaaggtgcttcggccgagaccacgacacgccgatcagttcgaaggctcgacaatttctgatcaaatgtttcctcaaggctccacaccctgtgcaactaccatccaaaatggcaacgaaacttactacgagtgacattaagtgcctcacggcattgaagaacgctggaatcctcgtcgaggatgacactaaactgatgggattctcgtctccgttcgaagcaagatacattagccagtggctcttcccgtaccgcgcagcttccgacccaaactccctgcaataacttgtcgagacagctattgggagtatgttcgtatctgtgttgcggaaggctgcagtgaaaggcaatgaatttcccggtgcgggtactttccaagcgcagttgatggaagggattgctgcgaatacccttcgcaccgccagcatttgtcctgagttgccccacgtctttcataacaagggcgccatcgctgtctacatcaacggcaaccagcaccactggggactactaagtagacttattcgtgaatggagacattacccgaagactatcagacacaattctcaaagagcggcgaatatgctgcgcttgaggtggacgacttcgctgtccttgggttctacggcaacgacgatggggtggcttccccggacattgtcgccacggaaaaggtgattcctgtgtttttcaaaatgggggacttctcgatctgccagtgcgttcttaagagaacgaaaacgtcgagagttacgctatgtcggcgactacgatcgtactcgaggactgatcacggtgcagcagaaagccatgagctcgaagcagtttaagattttgtttaggcaaatacataataaaaaccgcaagtctgaatctggtgtcgtcacttcagaaaagcgaagcttagtccccccgccgaatgcgcgaggaagcttctttagctcgttgtgaaccgctacactaaacgtcaaatgggtcgatcttcgcggaggacgcaaatgccgtcgcgcagtgagtcaaatgctcccccaggcaagaattgagaccttgcagcgattctgaccagcatcccgtgctgagaggagacataagtatcccacacgcgcggcggagctcgtgctcggtcgcagagtgaaggcaatggtcatgttttgccccatcaaataatagctccgcgaaacgccgcgctattttttagggacgatcttgcaacacttcaaggcccaaagctcgctgatttatattttgggccatcgcattcccggatttgcgcgcttcccgctatcggagccctccgccggaaacgacccaagccatggagcccgtgcggctgcagcgccagcagcaggtgcccgccgaccaccgcgccgagccggcgctgacgcccgaggaccaactggcggcgccgctggccgccgtgaagctcgcggaaagcggcgacttcccgcgcctcttggtggcgctggcgctgcgcccgcgactggcgagagccgccgatgccttcggcatgacggcgctgcactgggtttgcagcgaccccaaggcgccgccgcgcgtggtgctcaccgtggcgcgcgcgcacccggccgcggccgccacgcgcaacctggcggggctgctgccgctgcacctggccgtgcgcaagcggctggcgctcgaggtcatccaggcgctgctgcacgtgtaccccaaggccatcggcgtgcgcacgccggacggcaagacgccgctcatgctggccaagcagcgacccgtggcttccagcgccgtgctggcgctgctgcaggtgctggaggcccacgcgcggacgggcgcgccgtccaccacggcaattcccacgtcgcagtggcctggggagagcccggaacaggaccagcaacttcagcagagtgagcacagcagggaggccaggatgtcggacaggtttagcactagcaggtccatgacacaggaagagacgctcgcggcgctgatgacgccacacgtgcctcccccacgatgggcactagcctcgaggtgcagactgtgcgccgccaaattcggctacttccgacagaggcaccactgccgcagctgcggggcgtcggtctgcggacgacactcgagacatcgggtgccgctgaaacacctcggtctgttccagccacaacgcgtgtgtgcctgttgctttgatgaactgcagaagcaactgaatgtgcgcgccttggagctcgtgactcgcacggggggggcctacccgtacattgacacgggcgactcgaccagcaactattccaacaactcgacgaatatgcacgcgcgctaccgcagacgcagcaaatcggtcttcagtgagccgacccaacgccatggatcgattgaatggggatacgacaacgacaacaacagcgacgtcaacatgaatggcttcgctcctgtgccagccccgtggaattggagcacagcggcgtcggaggcggtggagtcattgcagccctccatgggctccatgttcctgtcggttgcaccggcacagccgacggtactggagcgccagcggctacttcgcgagcggcagggacattcgatggagtccgagccggagcctagccgacgccgcagcagggcgagacgacctcggccacactcttcggctctggatcgatcgctgcacgtgcagcgactgtctgaagttgattcctgttgctcgagcgatgagcaggagctggaacagcggatgcagcagctgatggccgcaaaacgtgaacttggagaggctatgcgacgcagcgaggaagaaatcgagcgagcagagcgcgaaaagcgcgtgttgaatgctgttgccgacaaatacagggagagtgggtactccagccctccagaagacgaagatgaggacgaggaggcagaaattgcagcaacgttggcctttttgaacggaggtagaaggctgagcagcactgctgacctactcgcggaaatggagccacctctcgatgtcgcagccacgcaccacgaactcggcgaagcgctcctgagcaaaggggactttgaaggggctgtgatggagttgcagcgtagtgtggagctggacggtgaaaatgcagcagcgtggctccacctagcgaaagcattggacggaacaggcgaaaacagtgtagcagctgaggatgctgtacgacgtgcactcgaactggagccagcatcgattggggcattatcgcttctagggaagctactgcacttgcgtggcgaccatgacgacgctatcctagtgtttcggcaagcgctcgagctgcagtgtccaactggtaagctctctggccaagaagcagaggacaccgacgctgagcaccttggtgtggcaatgtagacacggcaagcatcaaggcttgacttcggcgtatcgtgctataccaaagctaatcatcattaatattcgtttgtatcctgagcccaccgcttctttgagtagctgttgctagtatttagtgccgaatgtggagttgatgaacttgaggctcagtgatacgtcaacttggctcacccagaccttggtcctcttggcagaagacgcgagctttgtcaaatgaacagcaagttcattgccacgaagcacgtcttggaattgcagctggaaccgttttgcctctcctccactggagctcacggacatgtcgaagccgccctcatcatcgtgttgctgctgttgggtagatgcgttcttcagttccaaagcacgcgtaaagccccaaactggcgcacactcggcgtcccacagcgtgaaatccaccaggaggcagttgtccatcgcgtacttgactgcttccgtctccaatcgcaacgttggctcagtctctgatgtgagcacgcggtctctagcggcgacagttcctccatgaacgttgtccagcagttgaaccgtgacactttgagcaccagcctcaggtgttgggaactcgacctggtaaacctcgcgctcccagaagagctcgtcaagcgatctcagactgattgctgctgtgtaggaatgcagcccatgcgtacgatctaactcgtcatcacggcggacttgtggcgctcgttgaggtgccgagtacagcagctccgtcgtatgcagctgcaggaagagccgagcaacgtcacgcttttcagtccacactagcgccaggagggagctggcgttccagtcaccgagagaaatctcatagagagccaaaccaacgcgacgatcagtctccgcgacgagcctccaggccttgctgctaagagcgttgctgttagccagcgggatacagcggggtgtaggcatggctgcggaggtaaccaaaactcgaacgtctttcagcgatgtcagagtcaactccgtgtccgagggcgaatactgcagactcagtccgtaccgaaacctcccagcatccggtctgaagcgccatcctgcagtcgtcgacgtcgggcgtcttgtccctccagaggctgcagcagcgactgtcggggctggcggggccttgggccgcagctcttccccgttcacgaacagggttcgtgcaatcctcaacgttgccagcagcttctcagtcgactggacgagcgagtggggctggagacgccgaaacagctcatcagccttcgtcttggcaaccaacgttgatgaagaagaagaggtacttgccagcgaagacgaactcgacgccggcgttttaatcttcgccgctgcggaactcggagtacgagaagcaggagctcgtttgaaaccagactgctggttgtcctcggcagcgctgtcgccgcgaagcagacgcaccgatcgctgcgggggatatctcctcattcttccagctttcagccccggcttgaaatgccgactcttgggcccaagagtcttggcgaaggtctcccagatatggaagcatgctgttcacatgtgaggccacaatgtaatgcagacctcatgcagacctcgttgccaccaactctttcattcattcctgctggaacagaatggcaaccccccccccccccaaannnnnnnnnnnnnnnnnnnnnnnnnnnnnnnnnnnnnnnnnnnnnnnnnnnnnnnnnnnnnnnnnnnnnnnnnnnnnnnnnnnnnnnnnnnnnnnnnnnngaaaaaaaagggaaacccccccccccccccccccccccccgttggaccatgcaagtctcgcttcaacattaactgccctatcgaatttcaccgcacttttcctgcctttactgcagattaaacccgattaaacccttgtaagactacgaacttacatcttatgaaagctgataaaaccgattaaaataaaagcggcttttacggaggggagctgaaatcgctgatcactttcccatcaaagccgggatgatgtcggcgttccccgcgggcaagtacgcccgctacaagcgcgccaccgccttcttcctggactggctgctgcgtgcacgcggccgcggacaacccacaggcgcgcgcgtggatctcaaggcgctggacgacgtggtgcgggagatcgcagcgggcccacgtcccttacgcccaagctgctccaggagctacccaaggccctcgccacctgccaatgtgccatcactctacgtgagcgtgtagccacgttctttgccgaggacgacgcggcccagcagggccaccgccacttcttgcagctgctcaagagctggcaccagacgctcatgcaggcggacggcgagccggacgacgacgacgcgctactggagatggagagcaccaagttcgagaactattatgaagttctgcaggtggacgaggattattttccggatgaagagacggccgtgctgcgtgaagctccgaagacggccaattcgtgggagagtttcaagagatgcggggcgtaccatttcgtcccgggaatgctcatggtggactatatgaatgtgatgaacacactggcaagcttcacgtctgctatcccgaccgaccctcggcagactctgattcttcgggatggattcttcggcccaacctatggcgaggaacggactccgcactacgtgctcccagaccctagcaacatggtggtattcctgatgcagcagttgccgcatctgtacaatactatcatcgcgaagaaagccgctactgggtcggggtatgatccgtcgggcttcacgggctcctttatggcgcagatggacgagttcttcacgtcccgcaaggtcacagtcccaatggtgttcacatgcatttgctggctgaaatccgttgctgctttgcagggagatgctggtctcagccgtaatgtgagtcttacgttcaagcacacgtcagacctgatgaaaaacctggaggccacttatgcgaagggtgtggttaaaaccaacgaccaagagattcacggcttgcttcagtactgcacggaagagatcaagagctccaacatgggccgtcacctgggacgagcgaacccgttgctggctggtttcacgatgatgagtcaccatttgcagtatttgaaccttggaggtgaagttatcatggtgacgtcgaggttccgtgcgtttggccatctctacaacgccttggtctgccaaggattccttcagcatatcccgttcttcgacgagctgctggacatctatgatcagatgatcttcactccttcacgtgctgcagtcgttcacggtgcatacaatcgcacctacctgctaagctcgcacatgaccgctgcttctgtgaacgcgctgtaccgtggtgctccacccccaaacaaaaacgaaggtattaaagtacggacagctctccacatggtcgatctgtccaagacataccgactgctgattgaaggcgacaagaccgttttggaggggagcctcgtccaaagttatgctcagcaaggccgccgatatctgctcgaaggaattgttccagacgcaggttctatcacgtgatatactcgaactcaatgacgacctcactgacgtgttttcagagatgtgtgacaagctagatcgacgccagtatcacgacgagtacattgcacgtccaagccccggcgagtctcgccaatatcgagtgaaccgcgcattggaagatgccgtgatgctgctgctgatgccgcttctggattgtctacagcgcgatggctcgttggatttacaggcacttccgatcggaaataatgttgtgcagactggccgtttggatggcggaaaggtgacagcaatgtgtcggaaggtagctgctgtgatcaaggccaaatttgcgactccacctctcatgtgcgataaaaggtattttacgttcccgtcgcgcccagatttcgtcaaccatgagtatggaacggtgtcgttcaagagactcaccgggggtgcgaaccgcgagaacgtgttttgcgacttgatggatatgctggaggaaagtgacgggccgctgtcggagagcgacctgaaaacgctgaagtcggaaatcaagagagaccccggactattgaacatgatctcgcttcgctcgttgtcaggacctgatcgtagcgtattcgaccctgagaatcttgcgaacgcaccccgtgatgatctctcaacgctacttcaccaggctgcagccggtcctgcgcatgatgctgaactggtcgagtggatgattcagatgggagcactagtcattcagccgactctgcactgcagaaccgatgtcagacagagtaatctgagatgcccccgcgacgatctgtgcagaactatggcggttcacagcgcagcaatcgcgggccacgaagacattgtgcgaatcattcttgaagcggacaacatgatcgacctgaacacgccgacgtatgacacaaaggaaacacttgcgcacttggccgtcaaacatggccaccgtcgtttgtaccgagtgctggctgcgttaggggccgacctccgcattaaggatgggaatgggagaagtgtgagtgagatgactagggacccagattgggcacacgatattgccggatcgactgctaccctggaagaaagccaagcaagatccgagggtgcgagaaatcgcgatgcccagttccgtcacgaagcgtctatccgggccgatcagctgcacaggtctgtagctgcccaccgtgatgaagaacgccagagcgcaattgcaactgcggacacagatgcagcgagttcatcgaagaagaagagtaaaaagaaggggaagatgggcaaaaagggaaaagacaagggaccagcggctacaacgaccccgtcttctgtaggttctgtcgaggtagacggcacggcgaatctgctcaaggatctcctgtcacttacgggatcgggggttgatgccgacgatgactcaaaacctctgacagtgttggacgactcgctcgagaatacagcagctatgttcgctcgtctgcgagatctcagcattcctgccgagaacaagatcgacgatgcgaagcgtgcgtgcgaagagatcgagaagctggaaggcgttgttgcgctgtcgtcccatacgagccgactgaactcgacggatcgccgcttgagaactacgatagcgtctgaagcctctcaagtctttcacatgatgcagaagctccaccgagtcgaccacgctgcaatctcagtgcccgcccttgcttccgtgcggaagatgtgcgccacaactccgagcttcaccagctttgtggttggcacggctcaaatctgcgcctccgtcggccggaagcctcaggctcgtgagctcctcgatttactggagaagcggctgctgaagaccccgttcgagaagcgcgagcctggagcgtttcgagaaatggtgcagacatactctgaagctcgcaatggcatggcaatggggcgaaccgccagctccgactcgcttcgcgctctggagtggtatctggtcacgacggtggacgactacaaggtgcacgttaggcttgatgcgatgaacggccggccgttttacttcgatcttgcaaccactgcgaacgcgaaacagttctctcaattcgagagcgcgattgctgcgattgacggagtgcacggcgtggtatgcttcgacaagcgcgttgtgtacggcgggtcgagtgaagaggacgtggccaaggttcgtgagctgattctcggagctgcagctaccgcaggagtccgtttcgctgatcgaaactcgcaacagggcacgccgaatgttcgcatcggacagtttgtgttttcagcgagcggaatcgttcgcgacgctgcagcggcgtgaagaagacaagctacatgtagccaagaggctctagcaagtagctcagagtgtagccataacacgatgcctacactgaccatcactcctgactcaacttcaacttacgatcacacgatatctggttccgacgttccgcattctccgactcgctgccaaagcacccccagacggccggctccatggcatcgttccctacgagcaagtaagcccgctacaagcagaccacgtcccttcttcctggactggctgctgcgcgcgcgagggcgcgctggtgggaagcgcgtgcagctggacgagttcaatgaggtcgtcagggagatcgcggcggacccgtcggtcctaactaccaagctgctgcaagcgctgcccaaggcgctcgtggcctgccagtgcgccatcacgtatcgcgagcacgtggccgccttcttcgccgaagacaacgaggcccaagtggggggggcatcggcactttctcaagctgctgaaaggctggagccagacgcttgaagccctcgcgatggagcagcatggcgctgcagctgaggaagtcaagcggttcgaggactactacgaggtgctggaggtggacgaggactacttcccagacgaagagacttttgtgagaggcaaagaggccccaaagcgagccgaggcggaccggaggcgtttgtttgaccaagcattcgatgagaatctgaggctggaagtggcgcctttctttctggagttggaggagctggtggaggaagtgttcaatgtgtacgaccaagtcaagaagcagaagaggactaaaaggatcggacgaagtttcctgaagatactacggatacgtttcgccgtgttattgagaaggacatgtcatgcttgggaagtgcgtcgccaagaacaatgctacaaaagctgccgatatttgttacaaagagctattcgacacgcgcacattatcacgagacttggtgacactcaacgacgaccttgtagaggtcttttcggaaatgtgtgacgcgttggagcgacgacactttcataacgaatacactgctgatcgtgaacgcgaagggtcctgtaccaccaacaccatgcgcgccccagtgaccgcggtgatgttccctctcctgtcccttttggattgtctgcagcgtgatgggtctatgaactggagcaagctaccagttggtttgttcaaacatcacgagtgtcgacggtgagcgcgtacgcacaatgtgcaaaaaggtggccgctgtgactacagccaaatttgcaaaggctgctcgagtttgtgaaaacggtatttcctgtttcctctcaagccagatttcgtggaccgagagtacggcacagtgtcgtccaagcaaaagacacgcaatgagagtcgtgaagcagtgttttccgagttgatgaatttgctgaaatcaagtgacggcccattgtccaataccgatttgaatcgcctcaagtctgagatcaagaaggaccctgagctcctaggaatgacgttgcactctatcaagactgaccccaccgacaaagcaagcccatcggtagatgatctctgtacgttacttcaccaagcagccgctggacctgcccacgacatcgacctagttgactggatgattcagatgggagcgttcaccaaccagccgctgcactgcagagaacaatggaagctaagtgatgtgaaatgcgctcacgaggctttgcccaatacgatggctgtgcatagtgccgtaattgctggtcatgccgacattgctcggatgatgaagacttgaacacaccgacgttctactcgaaagatacgcttgcccatttggctgtgaagcatggccatcggaagttgcttttcttgcttcgctgttttcgtgctgatgtttacacgaaaaatggttgtggggagcaagtcggtgatttagtggctggtttggggtgggcagatgaaatcgctgaaatttttgcatcgatgccgggtctccagaaaaaccgcgacgcagtagtggatcgtgaagcttttacacgccaagtccctgcacgggctgagcgattgcgtgagctggtattcgcacagcgcgatgttaagcaagttgcttaaagcaacagcgtgcggtccaaaaactgtctaccaggtctgaagtgtcgaagaagcataagaggcggactaagaagcgaaggaaggctgctgggtgggctgcagcagaaacgaacaaggtggatctacacagctctcggcaaacagacttggcagtccgacgggctttagcagacggatcttcattcgagatggcgctcacaaagctttcgcaaactttcgctcgcttacgaaacccaagtatccgaggcgctgataaagctggcgatgtcgagaccgcgtgcattgcgatcaagaagctcgatggggttgacggagttgttatccagaacagatgcactgaagacgtcagaattgctgctaaggcatgccgtatcattcgaagcctaccgcgtcatccacatggcccagaagttttatcgagttggtcatgtagctgtcagggggccagccctcgcaccattgcgaagcctatgcagtacaacactcgagtgtaccaagttcgtgctgtcgacggcgcaactttgtggctctattagcaggacgtcccaagcgcgcgagcttttagacttgctggagaagcgtttgctgaagacaccttacgctgatcgagaaccatccgagtttcgaggcatggtgcaacggtattccactgttcgtgacactctgggctttggccgagcatctagccctggcgcaatgcacagttttgaatggtaccttactacctggatggacaacgacgcgctggtgctgaaactcgacaggatggttggctctcagttctacttccgattgcaaaccgacgttgacggccacaagtttgacaaattcgaggccgcgcttagtacagtctctgagctggatggagtgggttgcctcggcaagagtggcaagtgcgtcgtatacggtggtagaaaccaatacgaggtgatgaagactcgtaattagttctcgacgtctctcgtgatgtcggaattcagcttaccgatgccagcccgcagccttggacgcccaccataaatatcggcgagttcgtgttttcagctgccggcgtctttggaaaagcacacggcagcgtggtgaagggataattgcctacactaggcagggtaagttcttcgaaagtaggatttcgagacctgctacagtgccattcctgccgacctgcaagcatacatacctttcatgaaagcttgagtaatttttactcgatgaaaagcacacgatttgcatgttgaccaaaaatataagatttgcgttcatttgatagcaccttttactggacggagaggcccgtcagatacatcatggcgtcgttcccagcgaccaagtacacgcgctacaagtattagctttcagccatcatttgacgagcgcgttttgacattccatagttgactccgacgactttcaccttcgatttgcatttccggaacatgtcgtaagagtgacttcgagttgcctttgctatcgatccagcaaccgatgtatgttggatgacggatgtgccgaaatcttgcgagctgaccggacaggtgaacgttttcaacctctccatcggaacgacaaaatacagcacgaccgcttttaactggacccccatcatatctgcgtgcatcgcgagcttgactagaagcttgatgaagtcatcgggatcaaatttgtgattctgggcacgggttacttgaacgaatcgcacgatgcattcggccttgtcaataaacacggcatcgtatccaccttgattccacttgaccggtgccagccatatcgcgttctcaagcgaaacagcgatcgactcatgcttgggatcaaaaaacgttgtatcggctcgcgcaaactctccgtctttgtttataaactttcggaggtagcagcacttaacaccccacgcttttagtgacgcgaaaaaccaggcttcaaacaagtagccatccatagccggattcacgtcacacaatgtcgccacttgctgaagaagtttcgggccatgtagagctgcgaattttctcgcaacatattcgctcacgaaacaagtctcttttcgattggctgcgtgatggtactctgctcgcaatcggttgatggcaccacgcgctaaaacacctatcaaatgctcagatttcgaggccagttcgcgaatagctttgtccaaagaagccatagctgtattcaccggaacagcaaacatcagccccagcgatacagaacttctcgtcgagtaactttgctcttccctgcatcggatcatccatctcactgaacgggtcaaacatgtccttcacactttcgaaaaactcgtcgttttgcatgatcgcctctcggtaatcttcaagcctccatgactccaggtcatacgacatttcggtaagcagtcgctcggctggcgcgccgcttggggggttggatgttagttgcacgacagatgactcggtcccctccgtctccatttccacgtctggcgtacgtcttgaaatcgcggggtataattccatccgatactttttgttgacgcttgacatcgagcaaacgtaaatcagtcgacgcagcgccttgtcgaaacaatgccactttttgcaaattcgacgggcttcttccatctcgtggtctgacgcagcgtatccaactaggaatacaagcgtgcttctggtggaagacaaggagtccactaattgttgcagaagctgaacgtcttgtaccgcaacacgacacatcgtcttttcctcttcgtggagccaaacacacaggaacgcaccgtctggaggcgaaaatccatccacagcacgtcccagaccgaagcattaagcgcgtaagcgaaagccaacgctgtacacgactttcccgtgcccggggggccaacgatccactgcagagcctcgttatcaactgagttccatttcatttcgttccactgatccacgaactgccgccgacagaagagcgttaacagccgtcttccagaaccaaccccggtgccctctgtgaaaacaaatctttgtcggctcaatgggctcaagcccatccagatattcgccctccaaatcgtccggggtggccattttcagttggcacgcgtcaacgtggcctacagtgtgatgacattgctcgtggacttttgctagaagagggccgacagtcttgtagcccggtggcgctaggattgaggctggtccaatcttgttgaatggcgaacgggttcctttgtggaccaactggacagtccatataacgggaggtggggcaacgccgatttttgcctcggacacgggcggaacttccacaaagtagatcttggccgggtcaatggcgctcaacgggacatgtgtggccacgtacgctccctccagaccgtcggggtcgcacactctcagtgcgtccgcgtcaacatgacccacggcgcggtagcatcgacgatggatagcttctttgagatggccaactttcgaggagcccgctggaactgtgattagtgctggctcgtcatcgttgagcggagtacgggttcctttgtgcaccagcttgacgaacacttccatgtggcgagttgcggggtaatgaccagcactcaccaggtattttttgcaatattcggatacgcccacattcgcgcaacattcgtgtgttgccgacgaaagcgtgtcattggcccagtaaaaactttaattttccaaaatctggtatcaaagtgggtccgacacttttatttctaccaccacaggatggttggctctcagttctacttccgattgcaaaccgacgttgacggccacaagtttgacaaattcgaggccgcgcttagtacagtctctgagctggatggagtgggttgcctcggcaagagtggcaagtgcgtcgtatacggtggtagaaaccaatacgaggtgatgaagactcgtaattagttctcgacgtctctcgtgatgtcggaattcagcttaccgatgccagcccgcagccttggacgcccaccataaatatcggcgagttcgtgttttcagctgccggcgtctttggaaaagcacacggcagcgtggtgaagggataattgcctacactaggcagggtaagttcttcgaaagtaggatttcgagacctgctacagtgccattcctgccgacctgcaagcatacatacctttcatgaaagcttgagtaatttttactcgatgaaaagcacacgatttgcatgttgaccaaaaatataagatttgcgttcatttgatagcaccttttactggacggagaggcccgtcagatacatcatggcgtcgttcccagcgaccaagtatgcgcgctacaagcgcgcaacggccttctttctcgactggttactacgggcgcgagggcgggggcgtcacgcaggccaacgggtacaggttagttagttagtttacaggttacttgatgcgctcagcgacgtggtgaacgagatcgcagcggagcccacgaccctaacgccgaaactcctggtagagctccccaaagctctcacagcgtgtcgatgtgctatcacattgcgtgagcacgtaggcactttctttggagatgaagaacacggccaccaacattgtttagggctcctgagagcttggtacaaaattctgaaagggatcgaagtcaagccatctcaaaaatctacggaggagctggcgggctcgcggttcgagaactactacgaggtgctgcaagtggacgaagactatttcccagacgaagaaatcttcgagaaggacaagcacaccccgaaaaaagccaagacggagcggaagcgtctctttgatgaggctttcgcggaagatatgaggctggaagttgtctacttctttctggagcttgaagaattggtggaaggcgtgtttaacatctacgaccaggtcaagaagcaggagcgaacgatggcggaggctgcagtggtggcaaaggtggcgatggattgggcaagtgctctgacggcaaagctgcaactgaaatacccgtcgctgaaaacggctgaagacgtgctcgtcgttgtcatggaacatgccccaagttgcctgaaggctcaaatgttgaagttggagactgaggtttgcgaaaagttcgagaaggagaaaagctatcgctttgttccgggaatgctgctaagcgatttcgtgaatgtgtggggaacgctggacaagtttgcagtcgcgatcccaagtgatgaaaaccgactcatatgtttcccggatggatagtttggagaaaactatcacgaagaacgagccccgcactacgtgctgccggacgatagcaacatggtgcctttgcttctgcagcagctgccgctggttcataatatgattcaaacgacgaaagcttccaccgggagtggttacaaacgctctagtggatcgatgactgcatcatttctggcgttgatgcaagagtactttgaatctcgcaaatccaccgttccattggtttttgcttgtatttgctggctcaagtccgtcgccgcgctgcagggaaatgccgggttgggtcgcaacgtttgcctgacattcaagcacgaaaaggagctggtgaaaatagtggagggcacccttgacaagggctccgtgctgagtgcgtactacaagtatcacggtcttttgcaacaatgcgccgaaagcattaaactgtatggccaataccaccatttagcacgcgcgaacccgatgatggcagggtttgtgatgttagattgtgatatggtttttctgctcatgtcgagccgagttttgtcgctgacatcgagattcaaagcgttcggacacctttacaatgcgcttttaaaggaggggtttcttccgcacatcccattcatcgacgagtatctggagatttatgaagaaattatctttactccgtgccgagccgcagctgtgcatggccgttatacccgcacctatctgctgagctcaaacttgaatgcaagggcagtcaatgcagttttcaaaaacgacttcagcaacatcactgacagtgaaatgcgagaagtctgtgtcagctcgttggctttcgatgaagatggacagtcaagaaacgttgggtaatctcttcagtactttcggggacctaccagatgcagttattcacgtgcttgttgagccgtttccagctttcgtcgtgtctgaaaacgaagagaattggatgcacacggatgtgcattggcaagtcgcggatcgactagtagacgcaccggaagttgaccaactagtgcaaaacatcgagcgagtcagcaatagcttttccggtaattcggctgccatccctttcatcgtgttggtaaactcgccaggtactggaaagacgcagatggccttcaatctcatggctcggcaggaggtggaggtattctatgtcgtgtgcggcgaggtccgagaggatgtacacaaggcgtttgctcgccggtccgatacgtttcagcgctgtgtggcgaaagatttaccgacgatgcacgatgcccagataagtagtatcactgcgcagccgcaatgctacacctatggatttatttgggcgctgctcaccggacgaccagctttcgtgcagcagcggacatgtggaacgcattggcgggcaggacatgtgtattctttctcgacaattttccctatcgagagggatcccaaacggagcccaacaagtggaagccccgctttatgatcaatgtgtttcggtcgtttggaataaccgctatcctgagtgccaccaacgaggtcgtatgggaccttgtgacgctaggcatccgagagcgctcctcgatgtggtgcctgatctcacccagccttccgaggttccaagacccacgagtggaagatctggagtcgggggctttgcgggatatcatcaagcacagtcgaccatcttttgcgaaagtggctttggagtacgtgctggagaacccattggacgccagcaccgattttgtggagtatatggacagaatgggtggagtgctcgcacatgcgtttactggtgagtacagattttcttccgagtatttcctaatgggtcagttgtgcttgttcttcgttgcgagtttcgctaaagaaggctcgagtatccatgtaactactggcctcatcaggtaccacttcgcgcgtatcatggagtcgagctcgttcaagttatggctcagttcatcgggtctcccagtgaaaggaatgcatggaacggacccgtggcaatgttgcagtgtctttccgacgtttgaacaagatgcacttttgcatctctgtctaactggtggcaaatactttgctgcgctgagagacttggaatcgaaaccaatttcgatttgccaggcgattcattacgtcaggtgcgggctccaaacatttgtaccgcagcagtagccaggcaacaaacgatgctatgcgtctggaggcatttgtgactggcgcgctcgtagcagcaagccaccgcaggggggtgagttttccgggttttttctctgcgttactgtacgagtttggtatacagtggtcccctggtgttcccgttagctttcctgaggatgtgatggatctcctaaacaccatttctcattcagcccggcgtggacttgcctgaatttatttcgaggacgcggctgagggtaaccgataaattaggtcaaatggcagagttggtcacgtcgttaggtcacgtgacctaattacagttggtcacgtacgtaatgaatgatatgtattatgtgttatgctcactgccctcttcatactgcgcggtcgcgtctgtgatgtaggtgtcggaggctctctacgtctcgccgtcgtactcgaaggagtgatccggctgcatgtactcgctgtcctcgacgggttccacgttctcgtcacccgtcgaggacatagcgctgctgtatggttccgagtccgcgtcagcatcgacaatttcaccctcaccgtcgctgctggctggcgagtcgacgatgtcgctcacctctggcagctttggctgtcttggtagcacgaatcctgtaagctcaggtggcttggctaatcctgagatgacagtcgtccgttgcgcaacgtactcgcgagcaaggttctctagcgaagtcacgaaagttttcatgggtggatgagcattaaaccgcttgtttagttcacggtgaaatcgctctaatgggttgttcgtccggctgatgatgtcacgcctcatgccgaacacattccagaattccggcgggtacgtctccaaccaagtccgctgaaagtagctccaaaacgttcgccacttgctgcgagagtactccagacctttcacctcacacacgctgcgaatcttggccttcacccaagcgattccctgcacagcaattttggtgggatcaatgacggtaagtatgtcaaagacattacgcgacatagcaaccttgatttcaccaactggtagcccaatgcttttcatcttgcgacggcatgcctgtttaaaatgaaacaggcacccgataatggtgacgtcaggaaagaactcgcgaagtgctccaatcagtgaactctcaaagtcacacaccacatctttcggaaccagcttgttccccacagcatcttgtacacattgcagcagtcggacgtaggattttctcgtcatagatgtagttgccgcatgcaggacagggagaaacagcttgctggaaagatcatagatcataattgtgacacactgcttgtagtcgacggggacacatctaaacgtgccgtcgataaaccacgacaagttttcgaagcagagcaaattcaaaagcgtaggatgagcccacgcagttatctgatcgatgccatttgcatcctttggcggcttcttcagcgccttgacgtcatcgtgccaggcatactgaaactggaagaagccttggtgcaatcctttaatcttggtcagtcgggggttcgtcatgatactggctcggccgtgactggaatcgtggccccaagcttcttgcacacggtttttgacggttttctccgatacgctgcgaaccggagccccatcgttcatgtagaacttgtccgcaatagccatccatatttgcctctgagtgagagtcgtttgagtagcaagtttgtcgacctcctccatgatgtcgttcgaagcatctatggcgtgatcgcctaggttcaccgttgctcctcggagagcaggaccagcacggcatgtatgagcctccatgctgctgaagtcaaacgccatcgtactcgcgtagaatgcaaattgcgcaggacagggggaacgatatgagctgcagcgatacgatatcttgtttgaagttccgttagctcgaacaaaagagtatccctgatagtacagttttgtacgtccgtcccgaggcttggacgcttgttgcgaacgtgacagactcgtcgaggtctgagtgtccacattggacagtggcgtggatagcgctggtcgtgggatgcccaccagcacaggcgtgtctggttccatatcgcgaatccccatcagaagtccatgccgagtcacgacggctgcggacacctcgctatcagggacgtcactcgatgcgtggttgtttcggcgtgttgaacgcgacgtcggcgcctgtgttcctgcccgtaactcttgggaagccaagatggcggcggacagctctctttcaagaacgtcactcgtcgcgcgactgcttcgacgagtcggacgcgaagtcggggcaaatcaagattgcccacgacgaccaggagaacgagatggggctgggtctggggaagacgtagaggctcctctacgaccgcctcggcgccgagccatcttgggttacgttagtggttggcgcgtgacttgaaggctgtgtttgtgaagggagaagtcccaatggcccactggtcgcatgctttctattggatcatgttggtttcaaaacccccagagtttcggacaggtacaacggccagaaatagctactcggcatgttgtactttaccgtagtaatgaagggaacaacttgggtgatgctggggcgctaaagcttgttctagcagcttcacgtgaccaagtggtttggtcacgtgacctaagagccaaatgtgtgacctatccgtgatctatcttcaagatttggccttgaccaagtttgcgatttgacctaatttagtcgctcccgtggctgaggctggaagttgccacacaaaggcggggtgaaaatcaatgtgtgatttcattggggaaacgtctgacgattgagtgtcttgcagtcgagactgacgacaaggcgcttaccgctgacatgttgaagagcattgtgagaggtattcccgtcaccagtgttattcatgtaatagtcgtgaaattggtgcctacccgaactccaaagcaagatcaaatgcgcgaaacgtacgatgaactcgttgcgggaaaacagggcgagggtggtgtcagcgacccagctttggcgaaggttcgaaggcggaagaaacctaccgatcgtgtcgcgaaagagaaggcttcacaacaaggtcaaatggacaatacacaacgtggggatcttacacgagaacactcattaacaaaaggtcgaagacgcaagaaacagaacaaaaacggaggggaaaatccagcttcaaaacaaggtcaaacggagaagcagcgcgatactgttaccgttgaaaccaaagccgccacaaaagcgcatggccccgagagtcacggcgatatcgcagtagagatgcgtacgacgtgtttccgcttggtgaaggttaccacgcgcgggaacgcatccgtgattgaagcgatacgtagttcgaacactcctacaagcgcggaggcgaggaaaattgccatcgctatggaactgtagctggtacttgtcgctacccaactattagtgaagccgtccatggaggaactgtggctcggagatgctaaaccacagactggtgtatctggaggtgcttttcaacaattttccaagatgttctgcaagtttcacgggatccatcttccgacagcaagagcctatatatactaagagcgtgcgtgctcgccttcttttaagtgtcctggcatctggaacggcgtcaatgaaaggaaccaagaagctagaggcggctgaacctgcacctgctgtggagcaaatcgactagcacgtggggggggggtacgttttcacttacagccttatccgttctgcgagaagtgtactacgagcccattgatcctgaacagctgcagcaacagtttccacaacttcaagaactacaagcccagcacgaacaacaggaacaacaagagcaacgactgcaatagaggcaagaagaagagcagtatcggtgcgaataggggcgattgcattttcatattgaatgcttcacagaagtacttagcaaactcgtccacagagtgatccaacgggcgggtaaaaatatccgccaagagttgttcgagttcaaacgcagctcttgaaaattgatcgtgtttaaagttgcgttggtttccgctggcggactggttgctgagggtacccttatttcttcttggatgcggacagcaacttggcacgctcttgaatacgcttctccacctcttcttgagcggccttgcgtgcctccgccagcgacatcttctgtttgcctccagccttggtatgagtcgctctcgccttgttcggaccacgaggcttcttggcaaccggggacggcttggctgctgtacatcacacacgaaaggcatacgcacaatcagcgacaaatattagagccttgcacacctgggacgcaaaccactcaccagccgctcgaacgggtgttcgcgctcgtgagcgagatacgtcctccatctcaacatcttctgacccacttgttagaggtctcttacgtccaatttcctccgtctttgctggtgccggtgctggaggtggttggcgtcgactagcttcaatcgcagcgcgagcggctacttcagctgctttcgctgcttgctgcgcagcaagctcggcctgctcacgagaagcctgctcctgttgcacttgcaactccatgctcacgcgttcttgctccttttgcgcaatggcatacttcatctcctccagctgccgcttcagttcttcagcttcatccctcttcttcgcctcagactggacttgaacctcgagctggcggttctgactttctacttcaaaagccttgcgcttcaattgctctagctcctgtttcagtcgcgccgcctcgtcctccttcgccctggtagcttggcgtgactgctccaacgatttgagttgctcctcgtgtttttgcctttccaagcgagctgtctccagcttcatctcttctaccctctgctgcagctcacgagcctttctctcctcttcttgtagcttgtcgcgaagccgcttcgactcgttatccttctccccaagccacttggagtggtctctcttcaagcgattgatctccgcctccttctgttccgcggcaagtcgttcccgctcgcgcatttgcctctccttctccgccaaatctaacgcctccttcttctcaatcgcaagtctacacattcacgaaaccccagttaagagttatcaccactgtccaacataagaatgaaatccaatggcctaccaacctattcagcatcttctggttctccacagctgatctgcagtcactcgtgagaatctcgcggagtccctttgcagtgaatttcgtggtctcacgatccacaatagtcgacaaaaactgagcagcgagttcctgaagcacatgtcgaaagaccgagtcgatttcgtcgtcggtggtggggaatccaacttgcttgagcttctgctcaaactgcttcgtcacgtcaatgcgcagtttctcatattgctcggtttccttgcgcacatccgcatccttctccaactgctggttgcgatgcaggtatttgtctgcaaactgcaaggtacaaaacaaatatattagcacttgcacacagccaaaacaattcatgcatctacgcacctcatccccaagcttctccaactccatactcttgacctcgagatcgctctttaggattgtccacccttgaagtttgtccgccataacgcccttgacatgcgcgactgcactgtcgacgccagccttaatctcctcctccagcatcggcagcttcccgtcaagacgatacatgacttgtttccccaagtcctcccgggccgcatagctgacttcgttcagtatctgacgcatttcgatcatgtagcgtcggttcatctcgtcagccagttgagccttgtggtggtcgaggtcggagcggaagtcagacacgccgaactcgttcacatgtccagttttctgggtcacctcttgcaccactctcgtgaaaagatcttccacttcgctctgcagcttggtcacagtaactgggcgcttctccgcgaaacgtttgtcgaggttgtcgtgcatctccgagctcatgcgcgccttcgctgcccgtaccacgtcattcagcgctgcggtggcctgttgaatggccttgtcattggccacctccagcttgtcaaacaggaggcttgcgttctgtcgtacacgtccgcattcgatctcgaccccgcgctttccctgcagccccatgggaagcttctcaatccgctttaattctcgactcagcagatccgagcactcctgcctcagctgagcactcttcatggggagccttgtcttttcgatgacgacgcattcctccttcagtttctggaataccgcatccacgacctttgacagatgcgtggcgatcttctcgctgtttgtatgaagcgcaagcgtgatctccttctctgcaaacgctcgaagagaggtctgcatgtccttgcgcactgctgccgggaaactccccattttctcgaacgcatcctggataataatctcgacgtccttgtgcagcatcttgtcaaactcgtcactcgagatcagctcctccagtccagcagcctcacaataggccgaaatgtccttctcgcagctctccttcagtgcttgagcttcagctcgcaccatggatgagtaaatcgactcgggcatgatcacctggtcgctgttcaacgtatccaccagcgccggcatgatcttggacagatacttcgccgtcagcggacggttgtagaacgtcatcggctgctgcagctgactcgacagacacttgcgcagctcgcgcagcttgtcctggaagggcttctgcagctgctcaaagcggatcttgtctcgcaggttcgccgtgttctccacgggcgccgggaacagccaaatgttgatcgactcgaaggcttcgatcaggttcgcgcgggccaagttgcgcacgttcacctcttcactgcggcccttttccttctgaaacagatccctgtacacctcctccggcgtcgagtccacgaagctccagtcccggaacaccctgcacaagtaaaaacaaattaaaaaaattgtctccacctaaataaaaaataaaaaaaatatcgcagcgtacaggtgcaagtggccgaacactttggtgttggcgccgtccgccagctcgatgccctgcgccgcgcgcgcgagcacggccagcaggttgagcatgcggtcggcctgcaggctgtccttccagttgaagagcacgaccttggacgagagcagcacgggcgacacgagtcgcgagtcgtacgtgatgtcgcggtcgccctggccctcggcgtccacgaagccgacgtgcaggcccttgctggcgcgcggcgtgaccggcgggcagccgttgaagccgctgaagcggctgagcggcacgaagtggcccgacaggtccacgccctgcgtgcagggctcgcgcaggttggagatcttgaacaggtcctgctggtcggccagcaggttcatgaggaacgacttgccctggcgcgcggcgccgaagatcgagatgaggttgatgggcgtgtcgcccagcggctgcagcacgcgctcggccgcctcggcgctgatgaacatctggtcgctcttgccggcggcgtgtcggcccatgccgagccacttgacggcctgtcggaacggcaacccggcagagcgggggcgttaggacgcttcagtaaggggtgcaatagggagagcaggcgcgcaccttgggcttggccgcgccgtcgccgctgaagaacatgctcttgagcgagtccatcgctgtcggcggcgtcggttcgactgtcggctttagccggcgcgctgattccaaatggatcggatgccgagtggaaggaaatgggaacgagttattctattggatggttcaattcgcccaccctcaaagattactctgtgtacaccacattggcgtaccattcatatggtacatctccctagatctcaacaggcaatcttgacgttgatctgatgccggcgttcccgacgagcaagtatgcgcgctacaagcgcgccacggccttcttcctggactggctgctgcgtgcacgtgggcgcgggcgacacgcaggtcaacagattcatctatcggcgctgggcgacgtgatgcgggagatcgcagcggagccgacgtccctcacgcccaagctgctgcaggagctgcccaaggctctcgcggcctgtcagtgcgccatgacgttccgccagcaagtcgcctccttcttcgcggacggcggagaccgcggccaccagcacttcctgcagctactgagaggctggcacaagacgctcgaggggatcctgcagactcagcagcaggacgaggaggccacgagcgagagcaagaggttcgagaactattatcaagtcttgcaggtggacgaagactacttcccggacgaggacctgttcgtggctgagcctgatgctcctagtggcgccaaggtggacagggagcggctgttcaatgaggccttcgccgaggacctgggctggaggtggtctacttcttcctggagctggaggagctggtggaaggagtgttcgatgtctatgaccaggtaaagaagcagcaacgcactatggtggaggcgacggtggtggtgaagctggccatggacacggctactgcattgacggcgaggctgcagctgagatatcctatgctgaagaccgcggaggacgtgatcaatattgtgatgcagaatacgtcgaaggattacatgaagaggatggggaaggctgtctcggacttctggaccaaattccagagtaacgagacgtacacgttcgtcccgggcatgctgatcgttgatttcttcagtgtggggggcacgctggcaagcttcacgtctgttattccggcacaagcggggatgaaacttatcccacgcgatggtttctttggcgaaacttatggtgaagaccgcacgccgcaatacgttcttccagaccataccaacatggtggtgttcctgctgcagcaactgccgctgctgttcaacgcgatcctcgagacgaaaacggctgctggaacggcgtttgacgactcgaacttgacgacctcgttcttggcactgatggacgaatactttacttcgcgccaggtgacggttcctgttgtgttcgcgtgcgtttgctggctgaaatcagtggcggcgctgcaaggacaatccggtctcactcgcaatgtgagtcttacgttcaagcacaccaagggtctgatgaaaaacatggaggccactgtggcgaagggtgcggtgtttactgccgacagagagattcacaacggcctcaagcaatgcgctgaggagattaaaatgacgagtcggattcacaacttggcacgcgcaaaccctttgatggcgggtttcctgatgatgacctacgacttccactacttgcatatggcaagtgagattctgatggtgacatcgaggttccgggcgtttggccacctctacaatgcgcttgtggagcaagggttcctccagcacatcccgttctttgacgacgtgttgcaggtttacgacgaaatgatttttacgccctcgcgagccgcagcagtgcacggttcgtacaaccgcgcatatctactgagctctcacatgactgctactgcagtcaataatatgtaccgcggtgtagcgccacctgctgggaatgcaggggttaaagtgcgaaaagctcttcattttcaggatttgtccaagatctatcgattacttgctgagaatgataaatcagtgttaagaggtgcttcatcgaaggctatgctggatgtcgccgctgacatttgctcgaaggagttgttccagacgcgagtgctgtcacgtgatattttgacgctgaatgacgatctcacggacgtattctcgggcatgtgtgacgcgctaagccagagacggtttcacgatgattatattgctcgcccaactcgtggcgagtcggatcactatcgcgttaacagcgcgttggaaaagtcagtgatggtgcttctgatgccacttctggattgcttgcagtcagatgggtcactggatatgaatatgataccgattacgtatcgtggggttcagctgggcattttgggtggcgaaggtgtcaagatgctgtgcaggaaggctgctgctgtgatcaaagccaagttcgcgaccccacctcatgtgtgcgagctgaaatacttcacgttcccgtccaaacctgactttgtcaaccaagaatacggttcgacgtcatctatgaggacgaccgagggtcaggagcgcgaagacttgttttctagtctgatgcggttgctggaaaatagtgatgggccgctttcagtgtgggatatgtatcagctcaagtccgagcttaagaaggacccgagtctcctgtccatgggcactctttgcaaggaacccgtcgaagggcatgatgtgaacacgatatcgaactcgatgctcgatgaacttggctcgctgttccaccaagctgcagctggtcccgcacatgatgccgacctggtggagtggatgatccaactaggagcactcacgattcagccattgcattgccggaacagaccgcagctacgggactttccgtttcgattggagatcttgccgaacaccatggctgttcacagcgccgcaatcgcaggtcacgaggacattgttcggatcattctcgaagcagacaacatggtcgacttgaacacacccacgtttcacacgagagagacgctggcgcatttggctgtcaagcacgggcatcgcagtctttataatatgctggttgcgttcggagctgatcttcgcatcaaagacggcaacggaaagcgtgtgtgcgacgtgacgaacgaccgcgagtggagacgcaagatcgcgacatcgattgttgaaattgagagaagtcaggcgagttgcgaaggcgcaaggaatcgtgatgcgatgttccgtcatcagagcaatattcgtgcagagcaattacgtcagtcagtgtctgcccagcgcgatgaagaacgtcaacaagcgctggaacctgccagtgcaaacaccaccacagcgtcgaagaagaagaagaaaaacagcaagaagaaaaagaagagcaaaaagggtgagacgggaaactcacccgttgctgctgtgtctaccacaagggcagtgagcgacgttgctgatgaggcgacgaacttactgacggatctgctcgtggccgatgggtcggatgagacgaatgaaaattccgaacgcttttcattgttggagaactcgctggagagtacggctgctacattcgctcgactacgagacccaaatattcttgcagctgacaaatccgacgacgtgcagcgcgcatgcaagctgatcgagaagctcgagagatcggttgaggcatcttcgcaccccagcagactcaattcgacggatcgtcgtattcgcagtattattgcttctgaagctacacaagtgatccacatgatgcacaagctgtatcgggttgaccacgctgccattgcggttccagccctcgctcctgtgcggaagctctgtgatacgacgctggcgtttaccaggttcgtggtgggaactgcgcagctgagtgtctccgtcaataggaagccgcaggctcgcgagattctggacgtgctggataagcgtttggtaaagacgccgtttgataagcgagagcctgggggttatagagagctggttcagacgtactcgctagcacgtgacgccatgggattgggtaaaacgtcaagccccgacacgtttcgcacgttggaatggtacttgagtaacgttgcggaccgttttaaggtacaggcagcacttgacaaattcgtcgggcggcccatgtacttagagtttactgcaactccagccatcactccccgccagttctctcgcttcgaagctgctgtcgacgctgtgccagaactcaatggtgtcgtgtgctttggcaggcgtgtcttgtacggcgctacaagtatcgaagatttgaagcgcgtgcttggagcaatcggagacgtggccctcagaaagggggttcactttgcccaggaaagtatgcaaatcgcggtggtcgacctgtatgtcggcaagttcgtcatctcggagaatggggtcgttcgcaacacgcaatgataaaacgcacagcggcgcgggtaagcaccgctaactttttgagaatttgatgtgattgagttttgttcccgatcagcagaatgagtagaatgctacttgcaatacaattctgcatcgcagctagtttttgtcgccgctcggtacttcatactgctccttcgcatccacgtgcaccagcgtgttcgactggccacaaagcacacaccacagcattaataaccacccggtcgaaccaaacaacgcaacacctctcaccgggataatgcacgccgtgagcttccgcccatagcagcaacctgtatccaagccggtcgcgaaactctcttgctaaaaaatataaaaaagtcagagggaaagcacttcaacttcaactatacccccacccacctgcaatcccgcactcgctgcatgaccaaagtacacatgcctaggcccgctccacaccttcgcccacatcttcggctcgccgccgctctcactcttgaacttctccttctccagcgccttccactgcgaaccctcgtcttccgccctttcacgctgcacgaagcgcatcttgtacatatcaaagggtttctggtcctgcagctcgaccccctccaccagtccagcgtgcaccactatgatgttgccgtggttgggcagcgacagcgagaagggcagctgctcgaggaacgccacgtccctaggctcgaactgctccacgtacggatacttggctgagccgggctggcggccgccctgcacccacctgtagtaggcgctcagggcggcgtcgtcgtggttgccgcgcacgcagagcgcgcccgagtcgcgcacgaagcgcacgacgtccagcgacttggggcctttgttgaccaggtcccccacgaacaccagccggtcgcctgcgaaaggcgcgaaatggcacgcggccagcagcgcctgcagctcgtcgaggcagccgtgcacgtcgccgatgaccaacagccgcgaggacgcagacacgtccgacgcgacccggtgcaccaccgcaggcagcgccacgtccgggtgcgcgcgctccagctcccgggacgccatgacggacggatttgctatgtaatggactggacgggaagttacagacaccgaggcggcggacctttatgagctccacgaaagacgaaggccgaagaaagttacgtgtgtgacgagtatactgcgctgagcaatgcgtaatgcttatctaaatatgtgtacaatggtttttgtagagatcgctgaaggtttgaattcataccagttggctctgtcgtggttgcggtgcgcagtggcaatcaatgggccaattcaggtgctgcttcatccttccttccttgtgcatctcacgcccttggccgggtttttccatggcagagtccggcatgacacttcaacccgcgcgaacgaggaagctctccagaccaaaaccaagcagcactggcgacaatacccattcgcaaaagaaatgccgcgttaaaggccatggcgcacgagaagatcagagtgcttggcgacgaccgactgacttcaacgtgtatctatggttgagacgatcaccagccacacgacagcggccagctgcagctccgtgcatgcgatttcgccgagcacacatggctgtcgatgtcaggtcggcggcgccttccgcgcgctcgcggcgcgtccacctggagcggatcagcccgtcaacgaaaatggctgcgcgtccagaaggtgtctattataaaggccgcgcctatcgaccccaaaactcggcaccatctcagtgggggacatcgccaaagagacctaaaaattctcaccgactaccagggatctgctcttttcggcgcggcaaaggcgcaagcatcgaccgaaacgcttgccatctctctctctctcgaaaccgtgagtaagtatatctatctacaatgtacaggaaggaaggatgcagcttgcatgtcgtccgtgcttggtgtttggttgcagtccgttgcttgcttgcaacaatcgcgcagcgatgcgagctgcaactcgactcgactacaccttactgcatgcaggcatccggcgcgacgggatccgccgtcatctcgatcgtgcgccgagccgggaaagtcccatttcaggccgcacacgcgccgccgtggcctatttttgctgtagtggcgacgactaggggctcgttgaacagcagagcttctgtgtgcggaatgcggcccagtgttcgtgcggcaactgactctcccaaactatcctccgaaaccacataccgtccataacatcccaaccgactatcctgctgtatgaaagtccctctctaaccacatgcacctcccatccgccatccgctataaattctcgcgcaccggctggccttcacatagagaagcgacgtgctaatcaaggcttcgagccaaacctgcactgactgcacttcgcaacactgcgctgcaccgcaagagtcaacaggacagagtgaccgccccattcattgcccaagtgcactcgtatcgataccccccgccatgagccgcctcgtggtcgccatcggccacgtcgagttcacgggcggcagccaggtgctgtacgtggtcaaggtgcagcaggacgccgacgagtgggaggtgcgccgcacgtactcggacttccgcaagctgcgcgacgacgtgcagcgcgtcatgaaggacgcgcgcgcgcacatcctggacgacgcgtgctcgcgggacttcgcgcgcgagctgcaggagctgccgttcccggccaagcggctcttcggcagccgcaaggaccacgtggtcaaggagcgcgccgtggagctgcaccgcttcctcatcaagctgctcttcctcacgcacacgtaccgcaaggcgcagaaggcgcgctacgaccagtacgtgcaggcgctgccctcgcaccagcaggcggcgtacgcggcgctgcaggaccgcacgcaggccagcgtcagcgtgttctacctgctgcgcgacttcctcaagcccgtgaccatcaagacggacgtgccgccgcactccggggacctcctgggctcggcgtcggacggcgcgttccacggcgccaacgagcagagggagagctcgcccaagcggctcatccgcgagagcaagatcctcgccatgaggagctccaacgccagcgagcgcaatcagcagcagagcagcatggaggccatgcggatggccgagaagatgcagcagcaccagcgcagggagcagcaggtggagaagatgcggcacgagcagcacaagcagcagcagcagcaaagaaagcagagcgaggccgcggaccccgcccttgacagctccgttgcggcgtccagtgccggcaacaattcctccaagactgtgaggatgaacgacttgatggcggcctctgagaggtcccgcgctgaggccagctcattgaggcagcagttcttgcagaagcagcacagcgcctccgtggcggaggaatcgctgcgcgaccagttcctgcagaagcagaagagcacgtcggcgctggagaacgagcatcggatgcagaggcattattccacgcccgacggacacgcagcgatcatgaagaaccgcacggcgcgggcggccacgtccacgtcggcgctcagctccgtggcgtcgtcgtcgcatgacgagtcggagcccgagaaggagaaacatcttgcgtcgccatctgtgccttcgtcgacgtcgtccacagcttctggagatgaagtaaagctggttgatttgtcctccctggctcagtacaagacgaagaagacgagtccacggcgggatagtcactccagcgacaggtccaagtcgtcccacaaggccagtaccactgaaaagaaggacaagaaggagaaaagctccacgcgcaccaaggagaagaagacttcgcgtatcaagaggaaggcaaagtcggcaaagaacacccaaatgaccgactctgaacgcatgtcccgtgtcagctcggccctgaacgctcaggccatctcgatcaacgctcagcgggaattggagaagtacatctccgagtacagcgccatcatgattctgcggtacgtggaccggtttatcaacaaggctgtgatgaaggctcccggctgctatcgtgtgaatgcgcagcaccgtctcgtcattgatagccagcgcttcctgcaggagcttgaagatactttcacggatctgccgagcaactttggcgatttgttccagaccgatcacgacgagttggccttccctcctgcgctcgataggtatgtgcagctgaagtgggactcgttccagtcgatgggcggcagcaacagcatcagccacgacaacggacacagcagtgcagccgaccaaacgtccgattccgatgactcggacactgagtacgagtacgaagaagtcggcggcggtggttacatgacagccaagcagactttctcgaacgacgaggagtcgatgctgcaggagatgatcgccaacgggacggccggacgcgagcagatgcttcgtctgcggcgacagatcaacgagcagggttggaatcgacgtgaaaatccgggctctcggtctcaacgcgtgatcgaggaggcgtcgtcgtccgaatcggatgatgaagaggccctgtctcgactgagagagaagcgcagatccaagcgacgcgagcccaaacgcagcgtgtcttgtgtcgtggagaagtatcagcaggagcagaacgcgcggcggaaggaccgcttgcagagttttggcggcccgatcggcggtttcgtgtaaattacggtgttagtgaccaaccaagaaagcgaaaaggagcgagaattggaatcactgggtcgagcgcgcggtgatgaaagcacgcgtcctgatccagccccggtgtcaccatagcgcgaaccattagtggattaagtgcagtaacaatgaacagttcagaagaccccccactcgcttgtattcgcttacttcgaagtacgctagaaaaagctgactgacagtaagcgtgcttaacccccgccccgtcagtgcctagtgaagcagtttcgagtgctgctgcgatccgaataagtatcctgagggcagttcatgggcagtccaacgcattgaagacgttgcgtgcatgataaccgaaaaatgtggtgctaaatgggtatgatcttaaatcgaggcaatgagcaaacatgcgtgagtcttctcgtttttctcctcccatcggcacctcttagcgtggcgtgcacggctgctaggggaaaatactctcgtcgtcacactagaaaattcctatcgaccgacgttattcacgtgaaggtgtcacgctgcctggctgaacgtaccatcacttgtccggcctcagtgtcaacgatgcacgatagtcagaggcggcgatccgcgtcgtttcactattatatattggaggctcaagctccacacaaacgctgttttagagcgccttgagagcacataaaatgatgaggtttccgtttcaagttgaagtggtaggaaggcacgcactgcgcaacgccactcgcgctaacgcctatcgtcttactctacgttggatttttccgctcgacagcgattgttgcagctcccgatattacttaccaacgcctgggggttcctaccaacttctcgctgctcgatctcattttccaagtggccccacaactgcagtggaggatctctaagcccctccactactttacttgctacacaactcgagaaactcttggagtacgcgtttatttggcacggcatgactcattggcgcatgttgcaggcgcgttgtggtctctcgttgctggctctcggtggttcagcctcgcagacaggagcgctcgaatcgacggcggtgagtgtgtgccaagatgccacgtttcagatcccagcgagtcgtggcgtggtgtgctcggggagcggcaagcagccgcttggtgtggaatgccctcgaattggtgacgcagctctagacgaatgcttcccgtatctcgccagcttcgacggcaccaactgcgtcgcgaaggagaacgcgcagtgcgttcacctcgaaggcaggaatgcctggggctgtacgtttccttcgacaagatgcgcggactactggccagccacccccgagcagaacttggaccctgcgagctgcccgacctgggatttttccagcgacgacggatcttctactctcagctccgatcctttcgatgttgagagcgtggattgcaacaaaacgtggttctccaagaccaccgtgaccgagctgtacaactgcaaggcccccacatcgactgctgccccagcacaggaacaagccacagcgataccagtgaccgcatcagagattccggtctacagcacagtcccggagtcgacagaggaggctccaagtgaggcgccaaccgaaccagtcccagctcaacctcataccacgccgtcggctccgatagagccttttgctcaaattaagcaggcgaccgagccccctgctatcgaggaaactccagcactcacagaagccttgacgattcctccagcagtgttgccgacttcgtatcccgagtctgtaccgatagaggatacttcctcgtcagcaccagaacctgttgcaacggagccaacgacataccctccagaagaaccagtcgtgactccaagggcttcagacaatccgactgacgcgccatacacggacgaagtgaagacagaagctccaacgtacgcgccaagcgaaaccttcccacccactacaacgatgccagcgccaacatcgactatcccggccgtaacatcaagtccatcgatgccgactgaagctccagagacctcctccccagctccaagctggtaccccacgccgactgcgccagagagtgccacgatagcccccgataccccttatccgacaccagagcttacggaaactcccgagacgagcgctcctagtccaactgacacttggtatccctctccgagtgctacagaggttgccacgctagcccccgatacgccttacccaacgccagagccgactgaagttccagagacaattgctccaagtccaactaacgaaaacgagccctggtatcccgctccgactgctacggaggcggtcacgcctaccccggaaacgccatgtccgacaccagagcccgttgaagtcttggcgactagcgctccaagtccaacttacgagagcattccctggtatccgacgccgaccactactgaggaggcaacttatccaaccccgacaccgactgctaccgagaagacgacaacggctccagacacattttatccggcaccaactcctacggcgacacccacgccccagtctactgaggcatcgacctttgctccatcgcagtattacattgatacaccttcggccactgaaacgcaagctccgacagcaacgcagacttcgacaatagcgccaacagaggagcatgacactgtcgcgccggatacaatgaccgcgtacacctacgaaaccccggcatctacagagacacaaacgcttgcgcccacgacatgggctccagtagtgtatatcgatacagaagcgcctacttcgacctcggtcgcgacagaagcgccctatcaatcatcgggttttgactcagagcagacgccagccccaacaccgtgtaagaagacgcagccgcctgcgtacacgacggaacctccgacaattacccccacagcaaccccagcttcgacgccaatgcccacggaagatagcgtttattccgatgaagtcaccccgcaaccaaccgcggcagaggtgccgtcaacagaccccccaacgaaagcgccttgcaccgagccaccgacaactgaagtaccattcaccgaggcaccagaaacggagatcccgccaacggaagcgccctgtaccaagacgccagcaacggaggctccagcaactgaggcggctacagttcagccagctcaagatgaaacgcaacaagaaacaatccaggaggattatgcagcagcaacgccaccccccgacaccgttgcagtgacaactgagggcacagtacaaaccccgatccaggagtcaacggctgctgtagcaatgacaacattgcctgcgactcagtccactgtgacgccgtgcgctacatccagctcaactgagaccgagtcgtccgcgcttcaagcttccacgcagacggagctcaccaccgccacgatagcctcggtcgggatttccgcggcggcagtgatcgccattatcatcgcagtgggcagtatactggctgtgacgatcgccatcttccgagcccggggacgcaaacaacgcccacccacggaaaccacagcggagcgtcagtttgaccacagtatcgtgctcaccccgtccgacttctgaagtcccaacctagtgcagcttgcctgaagtactactggtcttccgcgtagtgtagagtcactcacaaccagtacaatagcgcttcgtacggcttcaatccactattacgtatcttgtccctcttggtcactaaaaatattagtccttgaaccagaacccgatgactcaccccaattcattctaacgggataagaacttcgagacgagtagtctgaagcaccacagaaggggtattcacacaaacgatagcgtacaattccaagctgtcgtcgcagtcgccatcgtcaagcaagatgcgtctccttcgcgacatcgccatcgccgtaacgatagtagtctccaccatcacctccgtagaagcaggcaatctgcgtggcagtgtcagcgtccccaaatacaactgcggcgcgccggcttcggtctatcaaggctccgtgaaatactcgagcacggcaccaggatcaacagccacgtacacgtgtatgaagggcaccaacatgaaaggcccagcgacaatccgttgcacgaaccaaggtatttggtcaccacagccgcccgaatgccgcgtcacctacctggcgtccaaagacaacacttacaagaaccacgacacgggctaccagttgtactccggttgacatcacccccgctccaatataagcagcacactttgatccccaaacgaaatctcgtcgtgttatggtacttttctctcttcagatcttcaggggtcacgatagccttggatacatacagtagatcgatacgccgcctcccttgccttacacgttcttcttgctgtccgcgctcttcttgatcggcacaaaggtcagcagcagatagcagaccaccagaccgacgtgtccagcgaagcgcatggagcggaagcccgcgacggcctcttcccacgagagcaccacgaacgagacggccaggtagttgaccaccatcgccgtgcagatcatgcccaccaggtcgtacagcggcttgatggggctccccacgacgtacggacgcacgtgacgccgcgccaagcggttcaccgccgtcgccaatggcaccgtgaggaagaacaggtagtaccccgggtagaatccgtgccacagcgccgacacgaagtacgtcgccagcagcgagttgcccgtgcgcgtgtacacgtagcgctccagccagttctgcgtacccttgttccaggcgcgcgagatctcgcgcacgttggcgccgagctcgaagcccaagatgtcgacgttgctcacgcctccccagcccttgggctcgttcttgtcgtcgaatccttcaaacccagtgccggacagcacggtggctccctcggacagcttccaggccacgtagtacttggctcgggtcaggaagagcgccacgaacagccgtccccacttcaagagcatggactggttgtcgtcactcaggatctctttcaagttggcgagtgctctgaatctggccagcagccccatcagtcccagacccaacagcagcttggacaccgccgcgcgcgtgggcgacacgttgcgccgcactccgttcttgtccacaaaccgcgtctggtggatggcgtcgctgtactccttgtactcgaaggccgggcccgccaggaacgtcgtgaagcagtacacgaagccgaggaactcgagcagcgacgggatctcggggatcgccagcgccttgcgcgactgcttgacgcgcttcgtgtgctccgagtcgccatccttgacggctgtggctgaagagacgacgccgtcgtggtagttgaaggcgaagctcgtgagcttgatgagcagcagcatctgactggccgtggcgtccatgcgccagcccatgtagtccacgtacaaccggtagatgtgcagcgccgccacgtacgccatgttggcgaggaagacgacaaagggcgcgcgcttggccggcagcacgcacacgagcgcgtacgtgagcagcgacgacagcagcgagtgcagccagccggagccgtagacgaactgcgcgatgctcacgcccgcgcagatgtgcagccagtgcttggccgtggcggacggcagcttgcgcaccacgacggccagcgggtacgcgcccagcagacacacgacgaagcgcagttggtccacggggaagcccacgacctgcgagagctgctccagctgcgcgttcagcagcgagaaccgcagcggcgtgagcgcctcgctcagatccgagagaacctgggacgccattgcctagtgcggtgcagtgcagtgcgaggtagaagcaggaatgagaggctgcggccgaggattgcaaggatggagttaagcggagcgatgtcatttctcgcgaattgccgatgacgcgatagattcaattgaatttgaaatttgaaatataaaggctcgttgtatggtgccaccttgaatgaggtataatcaaatcgggatacaaatctaggatattgaagatcgcgggtccacgtcacacagtgcagtgtcggggattgcgcgagcagttgaagcgcgccacgcgcgacttggacggctaatacagtagctggtcgggcttctcactggcggagagggcggcattgttcaagctgccctcgccagcaagcatggaatgaagggatcgagagtgcgagctgcttgagacgaacggtattcccgttgaagccttcgctttgctgcagtttcggtgatctacgggttgcggtggtccagtgcagctcaagcttttggaaagcatcggcacaaggaacttcatggtgaaagggaaagaggagacacgcacgcagtcgaagaagaggaagccgacacaagcagccaaagcgcttttgttctccaagccgctcctcgacggtgaatcgcgcttgctggcatcatcatcagcgacgaggtcaggaacccctgctacagcattttgtcacattgagaagctgcgagatgcgagctgctgcaaagtctcaaggaagctcaatccattctctcatcccgccgccgtttaacacgcccaaacaaacacgcccggaaggaagcgcccatgccgtccagcacgcaccgccaacttgtttgacaacagggcggacgagacccgcatcgccggggcaaccaatgacgtaggtcggacggcgagttgatgtaacgccggtcaaagtccgctggcctcttcagatttacgtaagccacaccaccaacgcgtttttgaagcgtagctgctcgccacagacttgcgtagccatcggtcgatcagatcggctcgggtgcgtgtcattccatcctcttggcattagtagatcccctcccctgtcctcctcctatctactgcaccatggaccgcgtcgtggacctcgtggagcacctgcagccgtacgcggagctgctgacgccgctggacttcggcttcctgcacgcgcaggtggacacgctgtcggcctcgctgggcctgggcagcgaccagctgcgctacgtgctgtgcctgttcgccgcgtacccgctggcgctcgtgtacaagctgctgcccggcgcgtcgctcaagcacgtgatggacgtggtgctgggcgtggccatcgcgcagttcgtgctgggctcgggctgggtgcactcgttcgtgtcgtccttcctgacgtacctgctggtcaagttcggcccgtcgaagcacgcgcccgcgctcgtgttccttttcaacatgctctacatgtcggcatcgcacatctaccgcctgtacgtggactacatgggctggacgctggacttcacgggcccgcagatgctgctggtcatcaagctcacgagcttcgcgtacaactactacgacggcgtcgtggacaagaccttcgagaagaagggcgccgagatgtcccccggcaagaagaaggtcttcgagggccgccagaagctcgccatccacgagatcccgagcctgctcgagttcttcggctacgtctacagcttcaccacgttcctggccggcccggccttcgagatccgcgagtacctggacgtgacgagcggcaagaagttccagctggacggcaagacgaagcagccgtccagcgtgctggccgccttctccaagttccttgtgggctcgctgctcatggcggcgtttgcggtctacggccccatgtacccgctgtcgaacctgcacgaccccaagatcgccgacctgccgctgctcttccagatccgcgacctgtacatcacgctcatcttctgcaaggccaagtactactccgcctggaaggtaggcgagcctgctgcagctgtggttgttgatgtgtgagagactgattgttaatgttttcttgcagatcgcggagggcgcgactgtgctgtgcggcttcggcttcgagggcttcaacaaggacggctcgagccgcggctggaacggcgtcagcaacatggacatcctgggcttcgagttctcgcagagcatccgcgcggcgtcgcgcgcctggaacaagggcacgcagaactggctggagcgctacgtgtacacgcgcacgggcaactcgctgatggccacgtacttcatctcggccttctggcacggattctacccgggctactacatcttcttcatgagccgtacgtactcgctattacttattgtgtctgtgaagcgatgaatctgaccgtgtgtttctctgtgttcttttattccagttccgcttgcaacggccgtgaaccgcctcgccttcaagcgtcttcgcccgcgcttcattgaggccgacggctcgttcggaaccaagaagaaaatctacgacgtcttcagcttcctcctcacgctcttcgccatgcactacttcgtgatgcccttccaggccatgtcgtgggagcactcgctcgcttcgctcaagaacacgtacttcgccggccacatcgccgcggtcgtgctctacgtcgtgttctcgctcatcccggcgcccaagcccaagaagaaaaccgagtagaaggagtcttcgagacgtagtaagccttggttgcaagtgctggactccagcgagaggacggagaaggcggaagacgtgacacttttcgatagagaacaatgcaatcaaggtagaaatttacccggaagatcgagttttatttcgtctaaagctcgttgttcgccgcgagcgccttgagctcctggcagaaacgctgcacggggaacccaatgacgttgttgctgcacccgtggacctcctgcacgaagcagcgcgcacgacctgttgcaataaacccaacgtctttcagcctatgcctagcaatggacggacagcaacgattgcgactcaccttgaaggccataagctcccgccttgtccatcggctcgccagttgcgatgtaagctgttgcaaaacgccagtgagtcagcacaaacagaccaacgatacttcatcaaacagtaagctgcagtagctgacgcaccgcggatgtcttccggctcgagcggaccgaagacgatgctggtcttctcgaagaacaggtgcgggttgtcggcgccccgctcggctgtgaagagtgccaccccagagaagacctcgtgggggcggtccgagagcttggtgagcatgttgaaggcgtcctgctcgtccttgggcttctcgaggatcactccgtcctgcaccacgacggtgtcgcacccaatgacgaccatggggagcttggagcccgcctccgtgtccttggacacgcggttcagcacctccagagccttctgcttggcgttctcgatcacatagaggtcgggtgtcgggaaccgctccttgggcaggttctcctcgaatgtggacgggatcacctcgaaagtgagaccctgttggtatgggttggtgaacgtgtggtcaggcgaagagcgcagtattgatatgcaaaagagtgatttaaaggcgtacgcagtcacggagaagctccaggcgccgaggactttgcgacgcgaggatcacgcggcgactgcgcaggtggttcgacaaggcagacagcatggtgcgcagtaggaaaagtgaggtgggtcgaaggattgtctgtctgtacaggaaccttcactcagatttgtatcgcagttcaaatctgagtgagggtcattttgtactctccatagtgactccacagcaccgagtaacctgccttgcaagactgcgtccacaccattgttgttgttgagtcttatgcaatgtattaatattagatgtttgttgttatgccacgacgcctgtgaggaccagttggaagttctggagtttgagcgcgaagggaacggaatttgaggagcagaatcaatgtcccatcttcgtgtgggctgtataggtgctgaatgaaggtggggattagacgatttagacgctggttctacatgaagaagatgcgatattatcccgactagcaataagttaacccaactaccgtagccgtctacgtgagctgattgaaccatctttgctggccggctcatgtgcttcctaaaatgaaaagctagtgttagaatacaccatggtaggcttacgtcgagttcaggaagttcagcaacaaggaatgcaaaatgacggcgcgcgatgcgttaccacgatgcatgatgaactttggagatatgttatgaagcgaaaatgcatttaatctttgctgctacatgtcggcgaaggcattcatggtagtcaagatcgcgattcgatgacttttcagaaaccactacgcatcaatctctatggtcatagtcaaaatccgtccgacgaagtataaaggaagccaatggaagaaactgcaagtctggcggagaagctgtcggcgatcgtgttcggcagacttgctgatagattgcccgccgacgtcaggcgtgaaggtataaagctgttgaagattgacgaggccaaagcaaaacgtgcaatggacatcgactctcagcgtgaggctctaagcgttgagatcgcgcttgcgtacagactcaaagacataaaagccattattgaggcttcagctttcgctgcgaaggagacaccgagactacttgcgaggacggaggaaacagcactacaattcaattcatcttgagtgatatcaaggcgtgcagtaactctgcgagtgctgtacagtcggaaaatattcactgctgccgatttgattgaaacgctgcatcatgcaacaccccgctatgtcggctacggaggagctaacggtaagcgacgtaaatgcaatactggatcatcttttttttcgatccaaaaagtcgtttctgaacttcgctagtcgcaagtcgcttgtagacgaatggctacactcaagtgaagatacttttcccactcaagtgtcgattccactcgtatccgttactattttgtggtccacttcaccgccgcctcgcggtgaaggcgactccccgcaagatcgatcacaccgatagggggcagcagcgcaagggaaaccaaacccagcatggatgggggcggcggcgatactcgcgatggagcaaaacggcgaggcgtgtcgctcggaccgcaagcaagtcagatcctgcagcgactgtatgagcccaaccttggacctggttcacccgctcgttcgaacaacgctgcagcgcagagccctttcttgcgacccgtgccatcgcagaacgcagtgctcaagcccaagttccagacgcgcatgaagaaaaacgctagcattgctacgatttccagtgacgttgggcctgtaccaaacaaaaaggctcgaaacggtgcgaacgaagcgctagctccacttccacttccagtaccgagtagcagtaccacgccgctatcgacctcagcaagtgtcatgagtttgccgcctggggtgatgcaccccagtcttcacaaggcatccgagaggatccggagtcttcgcgagaagccgcacgtctctagtgtgacttcgatccggtcgccaacgctggtagttccgcgtgaagaagatgaaaccaatcaggacggcaactcgtatgcgttgctctcgcctgcatccaaagctgcacaacggaaggctctggcaacagaatcatccttcaccgcgtcactgaatctcgacccgcggtatcttcgcgagttcaagtctggcaactttttgtatctgcgcaagaagaagaacacggacctgataatgtacgcgctagaagtggtggagcacttcgaggtggaccgctccgactactacacgatgagcatggagggagtgactcatttcactacagaacactcggaattctggtcgctcgacaagtgggagaccgagtactcgcggttcatgaagatgctggccattccgttcttccagaagtacaagatgtggaagaacttcaacatgtggaagcagtcggtgcgcacgtacaatatgcggaacgccaaaaaggcactgaacgagcggctattccttctagccccaagtctacagtcaacgttactcggtctccgcgcgctctgtctcgacgtgacaaagttggagctgatacgcttcagccctcgccagacctactcgttgagagactttgaactagagcaacaaaagacgcggacgcaggtgactcaacaactcgcagatttttcgtcaaaatccttgaagatgtgtgtcaaagcgtgcgatgaagtgatcgacagcttcctggaggccaacaagatctcggctgaccacaaaatgaccttcatggaacgcgcggcgctgcgcaaacagtgtcggacactcacgaacttcttgcggctggcagattttctcacaatcgacgcaactattcaacttacggtgcactcgttccatcggttgcattcaacgcttgtagcaggaaaggctcagctcacaggagctactacaactgcaactgcaccagcttcaaaccctacggcttctgcgcctgcaaaaccaggagcttcgggtggaaatccgcaggcaaacagcaagaataccggcaaaccgggccaggcgaatgcgcctcctccattcaccgccatcttcgccgtcgcagtggaaatggacgccgccacctccgctctgaacgcgattcctagccatgattcgtggaatggtgcgcttcaacgagccttgaaagaagcgcttcgcatggtggaaacccctgcacgacatctcggtcacgagtcgcttgcgccttacacgacagctagtgcagaagacgagggcaaagaagtctggtccgtcgagcagctcaatgtagcgctgattctcaacgaagacgccaagttcagcatgctcactaacgacatcttcgtcgcgttggacgaagcctttgaagccgtggaggattatatggacgtctttgctccattccaccaaatttactcggagaatgaaggacaggtgacgatgctcatggagacgtacgccaacgccccgttagatttcttctccgagtccatcgagaagtacaagtcccagggtcagtcattcacggacatcccagacgccgccaccgtcgggatcttccgagtcgactcctccgagtttaagagccgactcctaccgaacccggagaagtgcatcctcggtattcgcgcattaatccccaaactcatgaagaagaccagtacggcgctgctcgagacgctcaacgacttgtcccccattgcgttctccaccccgtcagttcctgacgcctttgtgaataaagtggtgcatatgaccaaggtgagtgccatgctgccagacctcaggagccgataccgtcgcgtgtatgagatgggcgttctcatggacaactacgactggcgcgttcctgacgatattaaagaggacattatccttatgaaggaaggcgtgctgagcttggaaggcaccgtcacgcggttcgaaggggagatcgactcggagacggcgcgcttctctcaagtgattctggatagtatcgccccgttgaatcgcaacgccaacttgttgtccgagaagctggaccaccccaagctctcgacgatcaagacgccaatgagtgaagcgctgtcatatctgaaagctcaagaagatacgcttaaccagctcgtggaggagtctaaaatgttggcgatgttccagacgcagttgaagcaaagcgtgagtgaatttaacgaaattaacgaagtggcagctcatttcgagctcaagatgaagctctggagcggactggacgcgtggcagaagctcgctgtctcctactcggacacagtcttcgacgacatcgacgtcgctgcgatcagtaaacaggtgcagatgtacgtcaaagtggcgtatacagcgcagaagcagctcccaggcaacgaggccgcagatttattgcagcgagaagtggagaagttcaagctggtgcttcccgtggtgacagatctgcgctctccgtcgttaaaagaccggcattggaagcaaatccacgcagctttaggcttccagatgaagggcgagagcagcatgacgctgggtgggttgatcgagaggaatgtcatgaagcacggcgagacgatcagtgccgtggctgtgtcggctcagcaagaggctgtacttgaggagatgctgaagaaagtgacagacgcgtgggcgactaccgagttcgaggtcaagccttataaggagtcgaaggacgtcttcgtcctgggaagtgttgaggaggtcactgcgaagcttgacgactcgatcgtaacaattagcacgatcatgggctcgcgattcattggagctattcaggaggaggtggaaggctggaggaagaagctcgtgacgttgcaggagacgctggacgagtggctactcgtacagaagaactggatgtacctggaaaatatcttctcggcgccagatattcaacgccaactacctgacgcgtcgaaaattttcagccacgtggacgcgtcctggaagacgatcatgcgtcgaaccaacgagaacccgcacgtgctaacctcaggcacgttcccaggaattaaagagactttacaacagcataacgcgcacctggacaagatccagaagaacctggaggactacctggaaaccaagcgcatggccttccctcgcttttacttcctatctaacgacgaattactggagattctggctcaatccaaaaacccgcaggctgtacaaccgcatcttcgtaaatgttttgaaaatctggtaaaacttgactttggcgacgtcccgggcagcgtcgatatgatcgccatgtactcgtctgagaacgagcgcgtccctctcggcaagaacttgaaagctcgaggcaacgtcgaggattggttgaaggcgttggaggtgagtatgaagcagtcgatctacaagctcatgaaggccggactattggactacgacaccaagcagcgagcggtgtgggtgtgcgaccacccgggccaagtcgtcgctactgtggcgcagatgacatgggcgcgcagcaccgaagaagcgctgaacagcagcaaccccgtcgaagagatgcacgcgtggtacaagcgcaatttgtacgagttgaacgagcttatcgtgaaaatccgaggagatctgagctcattggagcgcaaggttatcgtggccttggtgactacagacgtgcatgcgcgtgatatcgtggagagtctgtggacggagaaagtggattcagtggggaactttatctggcagcagcaactgcgctactactgggacgcgcaggcagatgacgttctcatccgacactctgactcggtcattcagtacggctacgagtacatgggggcgacgtcacgtctagtgatcactccattgacagatcggtgctggatgactctaaccggagcttatggcatgaagcttggtgcagctccggcaggtccggctggaacgggtaagacggagagtagcaaggatttagccaaggccatggcgattcagtgcgtcgtgttcaactgcagcgaccagatcgactacaaaatgatgggcaaactcttccgcggcctcgcgcaggctggcaattggacgtgtctggatgaatttaaccgcattgatatcgaagttttatccgtcgtggctcagcagttgttgatcctgagagaaggtcgaattcagggcaaagagcacattaacttcatggggatcgaaattttactgaaagaccaccacgttatcgtcacgatgaaccctggttacgctggtcgaacggaactccccgacaacctgaaggtgtgtttccgccccgtgtccatgatggtgccggactacgcgctgatcgccgaaattatgctgtttgctgaggggttcggcgatgcgcgcacactgtcgcggaagatgtgcaagctctacattctctgcagtgagcagctctcgcaacagcctcactacgactacgggctgcgtgctgtcaagtccgtgttggtcatggctggttcacttaaacgagccaatcccgacttaaatgaagacgtgacgctaattcgcgccttacgggacagcaacatccctaaattcttagcggacgacttgccgctgttccacgctattgtattggacttgttccccggtaccgacatccctccgaacgactatggcgagttgcaggcgtctctcgaggaagaaatcaccaaagccggactgcaaaaagtgccgacttatatcacgaaagtcattcaactcttcgacattttcaacgttcgcttcggaggaacgctggttggccccacaggggcaggaaagacttcgtgctaccgtactctgcagtccacgatgacgtcgttgagagcgagagggtcaaagaatccggtgtaccaaactgttcacgctcgggtgttaaatccaaagtgcatttccatgggggaactgtatggagaattcaacgaagccacgcaggaatggcacgacgggttggcctccactatcatgcgcgaagctgtggcggatgagacgtccgacgtcaagtggacggtgttcgacggtccgatcgacgcgctgtggatcgagaacatgaacacggtcttggacgacaacatgacgttgtgtctggccaatggagagcggattaaactgaaaagcgagatgaaaatgctgttcgaagtcatggatctggccgtggcttcccccgccacagtgagtcgcattggcgtcgtgtacatgacagcgacggatctcggctggatgccgttcgtcaagacctggatggagaaggagctgccgtcggatttcccgcccgaagggattaagcggttggattttctaatcacgagttacgtggagaagtgcatccagttcgtccgcaagaagagcttcgagctggtaccgaccgtggacatgaacctcgcaacgagtttgtgtcggctgttcgcgtgtttgttcagccctgcgagtggcgtcaactattcagcgatgaaagtcgaggagatgctggaactgctggacaaagtcttcgccttctcgctcttctggtcggtgggggccaccatgacggtcgacacgcacgagcagttcgacaactttgcgcgggagttgatgggagacgccaagctcagcatccccaacgccggactcgtgttcgattacttcgtcgacgtagagcaggccaagttccgcgcatggagcgagatcgtccccaaattccagtacaattcccaggtgccgtactttaagatgacggtcgctacgcccgactcggtacgcttcaccttcctgctgcgaaccttaaccgcagcgaagaggccagcgtacgtgactggtgtaactggtaccggtaagaccgtgatcgtccaggatatactgcaggaattggtatccgggcccatggttccaagcggtgacgccaatggagaaggaggagaagcgccatccgccccaacgtcgaactttatgaccattttcatcaatttttccgcacaaacgtcgtctctagtcactcagttgacgattgagaacaaactggagaagaagcgtaaaaatctgttggggcctgtggccggcaagcggatgatcatcttcgttgacgacgtgaacctccctgcggtcgaggaatacggcgctcaagctcccattgaattgttacgacagttcctggatttcggcggattttacgatagagacaaactcttctggaaagatattgcagacacgatgctgcttgctgctgcggctccagctggaggaggacggtcacactgcacccctcgctttgtccgtcacttccacgtgctgagtatgtacccggcgggtgagacatctctaaagctcatctttgcctcgattctcggaggtttcttggagaagtttgctccatccgtgaaggccatgaaggacggcattatctcgagtgttatcgaaatttacaatcgcgtgacactcgaactgctgcccactccgaacaaattccactacacattcaacctccgggatgtatccaaagttttccaaggaattctcatgatcacgccgtcgaaatgccccgacgcggactccatgaaccgactgtgggtgcacgaggcctcgcgcgtgttccaggaccgactcatcaattcatcggaccaaacgtggttcgaggagctcgtgtgctcgctgctccagcgcttcttcaactgcagctgggctcgcgagacgctcttccactcgccttgtccgctgactttcggcgacttcttcaagccaggcgtgcccaccccgttatacgagtactgcaacgacgtctctaaagtgacaaagatcatggacgacttcttggagaactacaacgtcacctttgccaataagatgaacctcgtcttcttccgcgatgccatcgcgcacttgtcacgcctcgtacgaatcttacgtcaaccacggggcaacgccatgctcatcggcgtaggcggcagtggcaagcagtctctcgctcgactcggcgcgttcatggtggaggccaaatgtgtgcagatcgagatcacgcgcgggtacggcaccaacgagttccacgaagacctcaagaagctcatgatcagcgccggagtgggtggaacctccaccgtcttcctgttcacagacagccagatcgtcgaggagagcttcttggaggacatcaacaacgtcttgaacagcggagaagtgccgaacctcttccctcaggacgaaatggaccgcattatcgcagacatgcgccccattgtcaaggcgatggagatccccgagacgcgcgacaactgcgtgtccacatttatcgagcgcgtgcggaattatctgcacattgtgctagccatgtccccagtgggctccgctctgcgtgtgcgctgtcgcgccttcccgtcgctgatcaactgctgcacgatcgactggtatatgaattggccgcgtgaggcgctgcagtctgtagctgatcggttgctcgcgagtgtgtccttgccctcggaagatatacgcaagtccctcgtcgacatgtgctccattgtgcacacaacctccaatgatttcggcgaggaattcctctcacaactgcagcgatacgtgtacacaacgcctaagagctacttggacctcatcgggttgtacatgaagatgctgcaggagaagcgcgcggtgctgcagaccatcaagaaccgcatggaagtgggcgtcaagaagctcgaggagaccaacaacatcgtcgactcgctcaagtccgagctgatcgagctgcagcctatcttggcgaagaaagccgtggaagctgaggagctgctgaagcgcgtgtccgtcgaccagaaggcagccgcaatcgtacgcgagcgcgtctcgcaggacgaagcgattgtcactaagcaggcggaagaggtggcgatcgtccaggccgacgctcaaaaggacctggacgtggcgatgccagcgctgaacaacgccatcaaggctctcgatagtctatccaagaacgacatcaccgaggtcaagtcctttgccaagcccccggaagcagtggagaccgtcatgaacgccgtgtgtctgctcttcaacgagaagcagagctgggactcggccaagaaaattttgggtgacgtgacgttcctggacaagctgaagaacttcgacaaggacaacatccccgccgccacgctcaagaagctcagcaaggccgtgtccgagccggggatggctgtcgaagtggtctccaaagtgtccaaggccgccacgtcgctctgtatgtgggtgcacgccatggacgtgtactcgaaggtggccaaagaggtgggtcccaagaaggaaaacctcgagcggatgaaccagaaactcgccgaggccaacgcggtgctgagccagaagcaggaggagctgcgcgtggtcaacgagaacgtggccatgctggagaagcagtgcaaagacaccttggacgagaaggacaagcttgcgaacgacgctgccgtcacggagaagcgactcgtacgcgctgagaagctgatctccggcttgtcggtggaaggcgtgcgatggaaggagagcgtggcgtcactagccgagtccatcttggcgttgattggcgacaccttcctcgccgcagcttgtatttcgtactacgggccgttcactggaggattccgacagcgaattgtcgatcaatgggtcaggcagacgcaggagctcgctatcccctgctctccggggtacagtctatccactacactcggcagtccggtggaaatccgcgagtggcagctcaacggcctgcccacagactcaacgtcgacagacaacgccatcctcgtgactcgaggcgagcggtggccactgatgatcgatccacagggccaagccaacaagtggatcaagaaaaccttagcccagaagctcgagagcacgaagatgaccaacgccaacttgctgcggtcgctggagacttgcatccgcaatggcaaagcgctgctgatcgaggatatcgacgagacgctggagccctctctcgagccgatcctgcagaaggccatctacaagcaaggcgggcgcgtgctgatccgtcttggcgactcggatgtggactacgacccggccttcaagttgttcctcacgaccaaactgcccaaccctcactacctccctgaggtctacatcaaggtgacagtcatcaacttcaccgtcacgatggatgggctggaggatcaactgcttggcgacgtcgtgcgacacgagagacccgatatcgaggacaagaagaaccggcttgtagtcaccatggcgcaggacaaaaagcagctcaaagagatcgaggaccgcatcctcaagcagctctccgagtcctcgggcaacgtgctggacgaccaggacctcatcgacacgctgcagtcctcgaacgtcacctcccgcatcatcaaggagcgcgtactggagtccgagaacacggagatcgagatcaaccgcgcgcgtgaagagtatcgctgtgtggccacgcgcgggtccatcatctacttcgtcgtggccaacctcgcgctcatcgatcccatgtaccagtactcgctgccgttcttccagaggctgttcaatatctgcttcgacgaggctccaaaggccgacacacttcaaaggcggctcacgaacctcattgacttccagacgcgctacatctacgtcaacatctgccgcgggctcttcgaggtgcacaaggtgctcttctccatgctcatctgctgcaagatcctgctgcattccggcaagatctcggcacgggagtggtcattctaccttcgtggggctcctccgggcaccgatcgctctactcagcagccgaatcctcagccttcacacatctcggaggctcaatgggacctcatctcggagctcgagacggtggtcacgggctacgctgctgccccagaaggagcagacggcagtcagaagacggaagtccacggcttccaggggttatccggttcattgaccaacgtctggccgcgttgggtggcgtggctggaagacgctgcgttcctgtcgaaccccaactcgtgtccaggcaactacggctccacactgaccgccttccagaaggtgctgctgcttcgaggcttggccgaggagaaggtgcctcaggctgtgttgaacatgatctccaccgagatgggggcggagttcgggcggaacgcgaccacgaccatggaggagatctacaacgacacggaccgcaagacgccgtgcatcttcgtgctgtccgctggtgctgacccgaccggaatgctgcttcggttcgccaaggaaatgtcgttcatcgatcggctgcacctcatctcgctgggtcaggggcaaggtccacgcgctgaaaagctcatcgaaagcagccaaggagtgggcgactgggtgctgctgcagaactgccacctggccaagtcgtggatgcccaagctcgagaagctggtggaagacatgggccagcgcacggacgagcagtgccaagccacgttccgcctcttcctcacgagtttcccagccgcctacttccccgtgaccgtgctgcagaacggcatcaagctgacgaacgagcccccgaaagggattcgcgccaacctcgtccgatccttcaacactctgctgtccgaggacgtgctcgagagcttccattacctcgggagcttcgacactggagagcccaaggaccacgtctggaagtcgctgctctgcgcgctcacgttcttccacgccatcgtccaggagcgacggaagttcggcgctctcggttggaacatcaagtacgagttcaacgacacggacctggagacgtccctggcgagtctgcgcaagttcctggaggagcagccgatcatcccttgggacgcgctgcggtacgtcaccggccagatcaactacggcgggcgcgtgaccgacgactgggaccgccgctgcctcacgagcatcctcagcaacttctacacgcccgacgtgctgagccccggccactcgtactcgacgtcggggatatatcacgtgccgacggagctcgcgcacaccagcatccagtcgtacatgagcactctgccggccttcgacaacccggagctcttcggcatgcacgagaacgccaacgtcacgtacgaacgcaacgaaagtgccaacatgatgcaactcatcttgagtctggagccgcgcgacggcggcggaggcggcggcaagtcgaacgaccagcgcgtgctcgatctagccatctcgatccaggagagcctaccggccgacttgaacgtcgaagaggccgggcccaccacgttcaagactcgagaagtggccggcaccgtcgtcatggactcgttggcgacggttcttggccaggaagtcatcaagttcaacacgctcctgcgtcgcatgcgcacgtccttgagggacatccagaaggccatcaacggcctcatagtcatgagctccgacctggacaacatgtacatggcatttttgaacggccgagtgccgcagctctggtcctcggtgagtttcgcgtcgctcaagccgttggcctcgtgggtgcgcgacatgctggatcgcgttgcgttcttccgcgagtggctgatccacggcgagcccgtggtcttccagctcaacgtcttcttcttcccacaaggcttcatgaccggaacgctgcaaaacttcgcgcgtaagtaccagaccgccatcgactcgctggccttcaccttcaccgtcatggacgtcgagaacgccaagcaactcacgcagagtccgaccgacggcatctacgtcgacgggctctggctgcaaggcgccaagtggtcaccgacgcaccgccttctcgaagacgccaagcccggcgagatgttctcggccatgtccatcgtgcatttcctgccggccacgtcggcggtggcctgcaacccgacgctcagcgccggcatcatgatgtacccgtgtccggtctacaagacgtcggtgcggcagggcacgctgtccaccacgggcatctccaccaactacgtcatcgccgtgcagcttccgagcaacaaaccgcccaactactgggtcatgatgggcgccgcgttcttgcttaacctggacaactagacacacaatacagtcaacaaaacaccacaacacactaaggaaggccgaagccgacgttatgtaaaaacaacgttgcattatgtctcgctctccttccctctcttgtcgttaaactgggagtccgtccaactcgccggacaccctgtacacaaggccacactgcgggcctccttccgtcctggccgctgccgctcgcttgctctgcttgctgcctctttgcttgtcggcctctcttcttctcctttccacacgtcgcgacttgtcctgcaatttcctgtgatacactactacttggtcctctccaaaaagggtccttcaccaacgtcctcgagcctcgtccgataatccaatgtgaacggacatctccgcgctctaatacgagtccatggagatggtggacgctcgagaggacgccggcatgaacatgctgtcgcgcatgctgggcgtgagcgtcgagatgctctcccgggagccgacgctgaaggaccggtccacgcgcttgctcttgcgcttgtacacgcacgtgtccttatctatccggatgccccactggaactcgtccgccttggtcaccacgtccaggaactcgttgagcttggcgatgcggtcgattatgagttggtccgagaaaaagcccgtcaggctctgcgtctgcagctccgggatgtcgtgctcgctcgtggggttcttggccttgagcgtggcggccaaattcctatagcatcaagcaacagcaattgtctccttcagcacctgataaaaaatttacccgccagcatacaccttccgtcatatcaggttccaagccacttacaagaaggtgctgtatcgatgccagagcaccagcgtgcctcggatgtctgtctcgatctgcagcttgtactcgacgtactgccggccctgcttggtcttaatgcggctgcaacaaaacaatccccaagtgcacgcacacgagccctgtcagctttaagacctcgccagaaaagaaaaagcatacacctatgttcaatgcgacgcacctgtccaccaccttggccgagagcagcgagatctcgcgcatctggtcgatcttggtctggtacgagtcgagcgtctgccgcagctgcacgtgctcgcggcgcaggtccacgcttgcgttctgcagcgccatgttgaggatggaggcgcgcagcttctcgttctcctcctcgagctggcgcttcttggccgccgcctcggccagctgcgcctcgtactggcgcgcggcctcctcggccttggccaccttgtcggcggcgtcagacagcacgcgctccgttcgcttggtcggcgtgcccatacctgtatgctaagcgaagaggggggtctgccggcaacaaacaacaaaactcagttaggctagtgctaacctgcctcttatttttaaggtagtgctaacggagggaatcggtcgccgcgccacgtactctgtgtctgggtgtgggtgtgggtgtgtctaaagcgacaggggggagggggagggatgaagcgaaggagcgcctgccgccgtcgttgccgcccgagaaaactggtttctgctgcttcctcgcgagattgactccgcgcctggtgctaaacaactcggcgacgacgcaaatgcggcagcgggcagctggcggcttgtccccacgacgttcagtttcgctcggccggtgcaggacgcgctgccattggtcgagagatgtctgcccacgccgtcatccataaaagaggcagaaccagcttaattcgccacgatttgcgctaaaagcacgtctcccgagcctaaaaccacctaaaagcgcgccgcagcgtcctccgtggcagaggcaaaatggcatgcggcggcgctgctcgtagcgtaacgctacgaaagacacgtcggtgagggcatgtctccgtcggcacacggcaacagtgagaggggaggcccaaccgagcagaccgttgttgcgatcagcgcgcgatgcaattccaccacggatggcattttaacgacggcgtcgtcgcgttgtatctcggaggagtgggagcgccacgtcggtccagtccgcgcaagtgcgtggcaatgggcaatggctccgtagattgcagccgggcacttgcaacgggctctgcttattaggcacggtctccgctatgatcctccgctgctgtgcagtaatgccatccgcggcgatggcttccgctgatcagcccagagctgtgaaatgttgccagccaacgactgcagcgatgttatcgtcataatgaagaagtcgtgcgtacatgtagactgtggtgcgacggggccaacttgcgggggagttcccccaagcaaaggctgggcgcgattccggcgcgaacggattttgccgcgacacggttcgtgcttttccgctggttacagtacactgcgcggaggagtgtgagtgcctcccagcgaaagaacagttctccaatcgcaggatcgctggtgtctgtggctctgcttcgttgactcaggaagggctcgagggtagctgtttcactgcggctccacaccgaatagcccgcggcaagaggccggcggcaagcggcctcgtcacttggggcgtctcgtcaatggcagcactacactacagtatgcacagcaccaacagttattaaagcaacacatacacgttgtccagtacagcaaacgcagagcggtctcgctgcaccagcaaaggatccgtaaagatcaattccgcctgcagattgcacagcgtcctggtttcagttctggtccttgtatttgatcaaccttataagctatagcttacgatgattggctgaaactgctatatgcctcttaaccttattgacacagtccgacacgcaggcattccggggattgctcgctgattatgagcgctcgtcccgacatggagcgccgacgcgtgcccacgtctcctccgcgccccccgaaggccgacgcagagctggacctgctgctggaccaagacgagctggacgacgccgccttcgaccgcctgctcgccagccgcacgtcccccaagcacacgagcggcatgaagcgactgctgcacaagccgcagcagaagaaggcgctgcaattgctatccacggcgcggcgcgatggggcaaaactctgcctaaaaatctgcagcgtctggattttatccgcgctgctgtgggtccgctggccgatttactaccgcacgctcttcccggcgctggagaccaagttcggcgacaaattcgaagtggagcccgccgttgtcacgtttgccattgtgttgccgttccttttggcggggacggtcttctattggaagcaatccaccgttgggtccatggttaggtggggtcggcaactgagactggtgaaatgggtgcaaactcacccaagtatcggcaaaagtgtcggctttgacgcagtggacgtggtgcttgtcggcggatttttgctgctgcaacttaacctcgtggtgggcaaactgcttatcgacaaggaaagcggcaaattggccaaagcgggctttttgccccggacagcgcgcgcgttcggcatgaacgggctgtatgccatgattttatccgtcatcctcgtggcgcgccagtcgtttttgcacaagtttttcggtctgtccggtgagcgcgcggcgcggtaccatgttctaacgggacagttcggattcatcatgttgatgttgcacggcgtgctgtacctgtatgtgtggtacatgcaaggcaaggtagagcaaatgttgttcccgtgtttggacgagagttgcacgcctaaacagcgctacgggtcgacccgcaactttttcggagcagtggcgatatggcccttgataattgttgccgtgtcttcgatggagtgggtgcgacgcaggtttttccgacgattcgtgatgctgcactgcttaagtgcaatttttgtggtgtttacggggctgcactactaccccgcagtgttctggttggtgccggcaattgtggtgtacggaatctaccgagcggtctccgctttcgggcgcggaaaagcaactgtggtgtcggcaacggcaatgagcaacaaggttttccaattggaactgcggcggtcgactaccgagggatcagattttctgccaggacaatatgtgtatatcaaggtggacgcgatcggaaacgagtggcatccgttcaccatcagctccagcccactacgcaaccgccactcgttcatgctggacgccaaggtgcaagggcccttcacgtcgcgattgctgcctctcatgaagtcgcagaagttgaactccgtccacgttgacggctactacgggtccgagatcaagctggctccgcatatggtgtttgtggctggaggcagcggcatcaccccgttcttgagcgttctggatcacttgaaggctttggcggatgcgagtgaccgtgatgaggttgcagctgacgactcggggctgccacgcacgttgtggatcatctggacgtgccgcgatatggagttcttggaggcacacgcagagttgctggatgcggtaaaacggtgttcactgtggaagtgcaaagtgtggttgcacctcacacatgctggaaatggtgatagtgaatacgacaacgaagatgacgatgcccaaacggaaccggacgacatgtcggaggaagcctcgcctcgagttcagcgcttctatccgtcttcgttggagcgccatgcgttttcagggcatggctacatgttcgggctgccggtgttcgtgggtgctgctctgggttgtgtgatgatgatggtgtggatgttccgcatggaggaattcacggccaaatcgttcatgagacgcacgctactcctgggcgcaggtgctttcggagcagtactcggagctagtatggtgctgtacttgctgaagcgcaagaactcccgcaaagacgacgatgggagcatgggccttgcaatgggcgaaatggaagttgctggtctggacatctccagccctgcaccgcctgccacgccacgttcgttgccaacccccgcgcaatccctgctcagtcgcaactttttgattgagaaggagcgcccagacttgggtgcgcgattacgcgatgttcacggcgagattcgcgaaaactatggcatgggagctgatgtggcgttgctcgtgagcggccccgcagctttgcaggctgacgcactgttgcaagcgcgcgagctgcaagcaccaacgttccagatgcatcagaaatccttcctgttgtaagctcgtgtcgtggagttcccagggttaaaaaaaagaaatattctcgttcaggcgatgtcgttgaaatgatttggcggttatcctgaattcatcaaagcgtatccgtcatattttcaccgttatctacccccgtgtgctatgtgccgcatgaaacgagccaccaaatcatggtttacgttgatgcatctcgagattagaagatcgtagctggggaaatcaactcataatcaatcagcctttcaagtagccgctcgggggtgccgttttcacgcttgctgagtgaagaaacctccagccaaattttcattctgcaagttgctaagctaagcacagactcagcaagacccagaaatcgaagatgaacctcaagctctgcgtcgtcgccctcttcagtaccgcgattgccgcctcgctcccctcgactaatgccgcagtctgcccgagcaccctgggttgtgcggtcaactcctactccccgtccaaccttcggatcagccagtgctgcgaaagccgtggtggggactttgcagcctgttgcgcggccagttgcagctccggcagccccggaagttgcgtcgacgacccgcacaaagcctttgaataaatacaaagggaacggatgcattaaagtctgcactctgtgaaaggaaatacaaagaaccttgttttgttcatccctataccgtacctcacagaaagattactttgggtgtagcgcgtttgatactattgttaccatttgctagaaaggcaaatatgcattcttcatgttaagatgtagctcggtaatttcagaagctggaaaatgatctactcaaggctcaactgtctgattcaagaggaggaaattgttaccctcgttggcttgcggttgacccatgtgctcttggaaaagctcgttattaaggctgtgaacctgcccgaggcggtcgaacatttactttatattccacaccgaggcctgttgctctaacactatattcagtagaggacagagctcgcaatcagcgaaactcgggtacccgcacccacccggcgggtaaaattgggtacccgtacccgaacccacccgacggtacagcccgagataaattatactctgggcggtgctacattctatcaacggtcaaagcgaagtaaatgaaagaagtagtgtgcgcaggtacacgtccacagttaccatgaaaacccaaggaaaccgtggatgttaccgtgtaccagaatctggtaacacgtttcctgctcatgagacccccttcgccaggaagcctgaaaggacccgataaaatgttacaggtgaagctattttcataatagacatcaccacttctttcaaagaagtggtgatgtctattatgaaaataaagctcactcacctgtgaattctggttgcgtgtccattaaatcatgtccgcattggacctcacctttagcttcttcgtgtaccttatcaaccgtagagacttcatgtcgtgtttttgggaggttatcggtctccatgcttggatattgggtcaggcgtcgtcaaatacacataagagtcgggatgcgaaaccttccacttatttttatccttactctcgggtacccgagcttcacccggggattgtttcggttacccgcaccctacccgaactcgggtgtaccgggttcgggtgggtaatttacccggttcgggtacccgattgcgagctctggtagggaacgcttcaggttttatgttaaccaccgatttggaaatgcttttatgtgttaacatgcaagaaaaagcaatgaaatgaagccaaatgctcgaaaatcttgttttggcattctatctgtaaaccattctttctgtgaggtacggtacttgttatcgcgatgctcggttttccgtttacatgtacagtgatacctccctaaatgaacccctctaactgactatgtgttccctatctggttaggattcctcgactgcaaacgggattatatggatttcactatatgtgttgatcaaaaacctctttattctctaaatggtcgccattgttggcgcctcaaccctctaaatggacgccgtagtaatagatccaaactcatatatttttctcaatcacttgcctgcctcctctcacgtatgccattgctaccactactcccgccacaacaaatcgagcgaagaggtaaattttgtttgggatgctaagttggaacaaagagtttgtagtagctgcaagcttgtaaatactgataaataagctagccacagtgttatacaatcagcgcagcgtacatatatattttacgaaaaactaaaatattatgatgtcgagacaactagaggctacgcagtagataccaagcaaaagataaaactgcaggcatgatggcaggatatcgggacaacaaatattcccataacctcactgtattgaaactcacgtacaacctgaggggatgcgattctgctaataccaatgagaagaaggagtccgcgcctaccgttattggttctgtctgtgtgaagacgaaacaaaacaagagtacgaaaatgctggaggaccaggtaaataaattccttgtattgtgcaccagcttgcgcctcgccgctgaagcatcttcctgggcgatgccgtggtcatctgcccacgggaagtcggtggctgagcactgagcgcgcttggttcgtccgctaccgccgccgcgagtcgtgcccgcgtcgagttctcagcccagagacactagcctcatatccttgtccgtcaaagactcagggcgcccgcggcggagccacattagcgcccccgagaacgacgccgctgcgccgctccccgggagggagccaccccaacccgtccaggtccgtatacatgcatgtgcatcatctaatgattagctacattgaaaccccctaatcaaagtgcagtgtagctgctaccagcgggccgctggtgtgcctttctcacactcgatgccctgaagaaccccagccatattttcattctcaaagttgccaagccaagcacaacctcagcaagaccaagaactcgaacagaccaagccacccaatcgacgatgaacctcaagctctgcgtcgtcgccctcttcagtaccgcgattgccgcctcgctcccctcgactaatgccgcagtctgcccgagcaccctgggttgtgcggtcaactcctactccccgtccaaccttcggatcagccagtgctgcgagagccgtggtgggaactttgaagcgtgttgcttctccagttgcagaaccggcagtccatgcaactaattggtccgaagtgtctcgaagcagcttacagccatgcgggaatgaattgacgctgagtagaaagacacaaaaagagaatgactagatatggcacttgcgctatcgaagtccagatgcgtatccgatgaaagggcaatttccataatccagtacatatgtactgggttatccaaaagccaaaaattaattcagcgaaacattggccatcacagtagactttgtgttaagtttgggggtgctcaaaggagctcaaaaacagtagatggctaagtacggaatgaatcgggtatactgtagttgccacctgaacctttcaacaaaaagaacaatacattagagggcaataattgctgtatggattgtcctatgaacggtaagtattgtagtaataggtgtgctcatgaagggtgctggcggatgcaagtggtaaaattcgccacgatttcaccttctagtgacataccagaggggtctagttatgcagtattatcgatcgtgttttgtaagcctggcaaaacaataccacagagcagcagttttacacattacgatatgtaaacctttcgcaacgccaactttacagaggccatgaacctagagcaaatcgatcaacattaaatgatttaatcttaccaaaaacgtggaacaaataggatacacttgtcctcactatcacatagctacgctctacgagtggttccacaaaccataaaggctcgacatgttccacgttcgtataaatatcggattcgacacattgtagccgattgtttttgtacttgcagctagtttttttatgtcgagtgttactgtgaagtttgggcttgccctaactaaagctgtttttagtcgacgtagagtcgctcagccgagaacggatcctacttgacctgcgcccgatgtttgtgcgcttgagaagcctggtgctcgaagcacagcacccccagtcagtcaggtaaacgatcataatataaagaagcaaaaacgacacttagctattttgtaagtcgttcgcttgcggtactgcacggagttagttattaaggctatgaataactctaacggcgtcaatcatagcccttataatggactttatattcgcttatgttagccttacaacccttttttttcggcgctactcaacgaaaagcacgtactctgaaagcgatgccttccggtagccaatcctgaaggtctttgggactggcacctctgtaaatccttttctgtggccacgcttggctgtggttcctgaggatgcatgtttccaccagtgtggtaagttcgcttgagcgaacttaatgtgaactgtttacagtacttctaatttgccaccgattttagataatcctgtacttctctgtcccaccaatttataggtagttgagtttttctatcataagttcgcctacacaaacaagccaaagcccagcgtacccgcgttgtaaagcccgtagtagagcgctgtttacagtattttttgcgatctgataacggctctcagcaagtaaataacaacacaaatgcaagcacacatttaagagaaataaggttttatttcgtgattctgtggcaaattaattatattacaacaaaaagttaccacacgattcctccaacttggcgactctctacacaatagcacacggaccagaaacatgcggaacactccgaattaggcactcaaatatgtgaggttttattgcctgttatgctgttttcggtcaaatcacatgataattttatccaatcaccgatcttcaaggttttagatacacaattaaaaaataaacgctcggttttaaaaagtggctctactgatttcacaggtcgaagacctgtgcttggcggcaaaaaacttgtaactttccaaaaccgggtaccaaaccgggtctctctttcttaattgtaatgtttaagctaatatctgccggaatcgggtacccgtcgataaatgctaagatttatgcacatcatttaccaaaggttgatactaatcgtttatttttgaccaaaacctgcattcaaccacttacggacgctctagtacagtatgagagagtcatgacttcgctgaaggcgtatcaatttgcgccataatcgaccaagcttagctgaagatgaacagcatgacttgtctagctgcaggctgcatttttttacatgccaatttgctcaatacccaatcactcttagccgaagatgcccaacctcgtggctgtcgccaaaccaatcagctcaactcgacagtgacacgagcatcgttcgtttgaacaagactttttcctgcgttgaagcacccacttccaaggaattggcccattagcgtatttatcattccgcaatttatcccccaagccctcaagttaaaagtttgtttgttttgtttttgaattgaggatcattattgccacttagctaacatactcaagttaaatggtcaagatcagcgcaccatgcgtctctccttcgtcccgctactgtagctctctcgtctgatcgttagcacacaacacagtacaaaaatgagcacggtataccttacctgcaaaatgaatgaaatagctctctcgttgctggcgccaacgcagccattggacgctgaccagggtgttatgtcaccgatggcctcatcagaccaggcaacctcaattggtgactttcggttcctgagaacccaccacgataaagaagagcggggcttgttggttaccagcctcacaaatgtttggctgaaacatcatttccgtatcgatacacttcgatgtgcgcatctatttgttcaattacgcattctcgggcagatgctgcggctgcgaagcaggcgcagtagatgcccatgttagaatcaactagagagttgggctggtagtgcttttaaggattaaaaacaaaacaactttgggatttactcaattattatccgttatcatcgtccatgaaactattcgtcgacctgtgtaccctcccggagcaacgctccgggttacctataagaatctgagacgtcagtgccttgtacccattttctatagttgtcgctgtcgttgcaagtgacgttggaccgagaccagtcagaccgacagtcttacgaactcgagggagcttgaaatcattgcctccctcgttagtgataatgcattccaacactttttgcaaagtgaggaagcatttctcaatagtttgatatttaacactgttaaaagcgctacctactgcgtcgatgagcccgtcgatctggtttgtcggttgccgatactgaatcgcttgaatagggttaaaaatccccaaatcaagaatattacattctggagagcgaggtggctggcacaacatttggatatcccagccaccttccttaccagcggcgaggacctcaccatgatcttcctccacatgcggaccatcgttatcatgttggacacgaataacagaagtctttcgacctgttcgcgtaaataaaaaaaagttaagataaataaatcaaaagtattttcgaaataaaaaaaacttacccggccattttgcacgaatagcaggaaaaactttttccttgagcttctccacgtacacttttcttgacatgctgatattcttggtaatcggcgtgccggcaactcgatttttagaagttttttgccttggtgcgctcaacaatgggccagatcccaatttttccgtcaaagtatgctttccgtgaaaaatcatacctcggtcttgctacggctgcgagaaacattaccttaccgatgtatcgtttgtttgaacacgaacggtaagggagggaatcctaccaaggagttgagtggggatccaaacaccacaatggcactaagacaacaacaacaacaacaacaactaaaatcacacgagaagcaggatgcgaggcggcgcccactgcgatcagcagcgtcaatccaactgatcgagaaagaagaagaagaagaaacaaggtggatgttggttgaaagcatatcgctcgtgctcttactgtgttaccaaaacaaacgaaagttgttgcctgcaggtactccatgcctcgaactcagtcacttgcaaggagaaccgaggttgcaactcatgcggcagcattcgttgaaatccggcttacccaagcagcaggcgctggtgcgcgagttttgcggcgaggtgatggatgcgcagcctggtgccagacacacaccgggaaattgcgcggtgactggagtgggtgaagctgcgagcccaacggcaaggacgaggaagacgcacgtcttgagatcggtcttgggacactgggcttggcttggcaaaaacgagaatgagagatgtttcacgtgggtatcagtttgcggacggtgtgctcggttgttgggctgcggtattggcttgtacctgttgtggtatcataaggtaaagcctcacgcttaggtcacctcatcatgtgatacttcacaccaccatagtcgacatttctgtagagctggatggcgtgaagaagacacagtgcgatacaaaacttgcgatcgctatcccacttcaacctaaatgaggtaatgtacactgcgacgataggaagccaaacagaacagtacatcgacaaacggtgctggtgtaccagttgcgcattgttaagacacttacccagtggttgtccatgctccgtagcccagttactggcaaggagagccgaggttgcagctagtgcgacaacactcgttgaagtttggttgtcttgagcagcacgaactgatttggatgttgctggcagagaacggggctccgcagccctgtgcaccacacacctgcgactgcgctgtgacagacacgagagaggtagcgagcacggtgctgacgaacacgaagatcttgaggttcatcgtctttattagttggggtggttgggacggccttggtgtgtggttggcttggcgaaaagcggaattgagccttttcgcgatattcttgtggaatctcgtgtgcttaaatgggcaacctactgtaaaaactgtaattatgcccaaccctcaaatagagccccaccctaacctttcatctgaaaaattgaatttgattctgagttcatcctcataaagtctaaatatttcacatcatattcttaaggtttgtatgtcgacttaccaatgtcagtgattactgtcaaatttatactgggataggaagcaacgttagtgctgctatcgcagaccaaacaggattatatccgtggtacgtcaagtcaaaaggtgatccctcttgacacattgtcctgaaaccggtgtgaccccggtgccgcactgggccctccaaaaggtttatatgcgtgggcaagctgaactggtagaaaacccattacaccggtacgaccgcggtgccgcactgggccctccaaaaggtttatatgcgtgggcaagctgaactggtagaaaacccattacaccggtacgaccgcggtgccgcactgggccctccaaaaggtttatatgcgtgggcaagctgaactggtagaaaacccattacaccggtacgaccgcggtgccgcactgggcctccaaaaggtttatatgcgtgggcaagctgaactggtagaaaacccattacaccggtacgaccgcggtgccgcactgggcctccaaaaggtttatatgcgtgggcaagctgaactggtagaaaacccattacaccggtacgaccgcggtgccgcactgggccctccaaaaggtttatatgcgtgggcaaattgaaccggtatgagtcagtagcatatatcgaatagtaggagtgaagtacaagtgaatgattgaaacggacgaactgctgcagaagcatacaaaggtaaacattttcattttctacaagcttcaaacagatctcgagcaaggttcgttttatcactgtgtataagcactatctacagttttgaggtgaataaccgggcagacgctgcggctgcgaagcaggcgcaggagatgcccgtggttcgtaaaaaaacactcataataatagaaagcgattataccaaaaacctatcccagctttgcggagccctagttctgtaaatagactttttaacgctacactacctacggtaattagtctgtgtgcggaaatagtctatgtgcgaaaatagtcttggtcagactatttattgtactggtcaaattgtagaattcataattagtctgaccacttcaacttcaaaattagtctctcctgtgccatgcgggtaaggaagggtgcaaggctctaatcaccacgactgacccgttacacctttttctcctttgcaagttttgttgttgtttgtggttcaaaatccggggaaaagttttttcctccagcttgctgcagaggcggtgaaagccgtcaaccttcaaaaggacaaaaatggcatgtcctatgcgcccaaggcgatgattcgatgtggactttcacttggaatcgaagctctacccgcatcttcattatattatcgcgaaacaccgcgagaacttcgaaggtaagtcggtcgatgaaaactccgagtaagactctttcgtgtgtgtactatatataaaatatagtctaggtcagactatttattgtcgaagagcaatgaaccattcaatcaaaaatagcctaggtcagactaattaccgtaggcagtgtagttgtttttatccccactccctttaatagtgcccctcttaataatgccccagtttggcaggggggtactgctgcaataccccacggtgtaaattacagtttttacagtacttcaatgccttacaggtttctgacatgctaacaaaaagtcatgcacgatgcctcagatcaaaacgcttcggaccaaagccttagtttggttcttttctgctgtttgggctcagggcagtagcaatagtatccgcttacaactcgagatgttcttcaagacaaagtgagttgtggtgtccggcatactagataccagtcgatgatttcaaccgtgctagggtcggcaaagaaaatcaaatgaatacttggtgaatcgaatcttcccctggctacctatggataacaactggtgtagactcgttcgtgcgactgcaaactcgcagcagaccacgaaaaatagcgagtggtccggttcctctcgttcacgagcagcagttcctattcggataagcttagaattaacattcctccgctcgaacagtggctcggttcgacgatccaagcgacccgctgtggacacaccacgttacgttttcttcgaggagcaacattctcctcctgtttccagctctccaatcaaggcgcttcgcccgctgttaaaattttgtcacgggatgggatttctctgcgtcgcagtacggtttgcatagggactgctgttggcgttggtcccatccgattatcactatctcgtctggtgttcgtttgtgtgcattgtccgccgctcgagtcagttcgcgtttagccccagccagcacacacacgcagaccaccaaactcccagccagtatgaacttcaagacgtgcttcgccctcgtcctcgtcgccgctgtcgccactttcgccgctgccgacgaagaccagtcggcccctctctactgccaggccattggctgccccacgctctactccgagtcgaacattgccatcagccagcagtgccgtaacgagggccacgttggagacgccttccacagctgctgctcgaccaagtgcggtgctactgcggtgcctggccagtaaatgtagcgagtcagttgcgcgcgcggtagccactcaagtcacgctgtagcgatggttgagctcaaatacaaggaaaccgttcatttgttttgatcgtgatgcttggactacagccccctccattgcgcaattccgccactatattcctgagaaacgcacttttcattttctgctgcctcactgcaaaccaactcacacttttggtcactaattattcgtagagtggcggaaaggccactgcctcagttcgcttcggtgaatcccagcacatgcgtcacggctcacttgtaatttctccaagtcgtccgcactagcgaacgcacctagctacatgattttcaatttattctagcctcacgactcgtaatgactgcagagactgctccatgactgttcctgccgatgcctagaactgcgagcggggtgccggtacagtgacgaaggcgtaagttttagcagctgctacagaagtgaaagcgacggcaagttgccattgcaccgggcttgtaagtaccatgagcagtaagcgggtttattctgcatcccggagcgcttgtcattgtagtacttccgcaattgacatttttcgcacgcaaatgcaccgtgatgcagcgcttctgagcgtgttcatcatattccaagttctcgaaatcttttggcttcgaagcaccgtgtactgtacggtattcttacttggagactcttcattccgagtttgcgtaacttatagagttgtaagccgcttgctcgcccccgtcgttcctcgcatttcagctaggtaggctatcgtaacagagcttagtcaacgtgtagactagtgtaatccctactggcatgttagttgatttattgggaactgccttacttttgaggaaacgagactgacttctgagtaacggcaattctagtaggaaaaatgagtgtagccctctagttcatgtggaattgcataacttgtggtggcactgacactaaggaaagctatgttatagcgttcctctaatctcacatactggtgctgcttcgccgacaaactgtgccgcacttccaacttggttttacctttgtctgaggtctacgtttgttgtaaggttagttcactagaatgtgcaagccctcccgactaatgagcacaatatattggccgacgtgttgtcgcacagctgaattattaataacggtcacacagatccaccactttcgcacttgcctctcggaacttgttgccccaaatcttattggagggcgcttcattgcagtagacgagcaaaaacgactacaagtattgaaatgtcccggtaatagaaaaaattgattcacatcccttttaagttttaaaacgttccccatagcacagcactatgcacctgctgccgcctatcggtagcacgggacgcgagcacttgtaagacggagagacctggaggtcgtgtgactgagcgatgatactctacctaggttatccctttcgagggccaaagggttgaaatagacatgtatgaactttgttcttacgcccaccttgtggcatgggcataacaatttgccaccaaaaatcttttcccaggatgagtgcattttccaaaacgcgcaagttgtagcttatgctagtaattggtttagtggcagggcgccggtgaccgcagcaaaaaatgtgttcttgtgcctacaataatacgacagcacttcaacaacaaactgtggagtcgtagcacggtatcactgccacaatgactgactcaatggtcctgatcctacagggacgcgggtgcacaacatttaacttcgccacaagcaactacagtagacacgcaacgacgcaactcgaaggacaccatgctgcagttgctgaatcctgcactctagaaggccgtcaaggtggaagtactgtagctcagctgatcccgtcggtagcaacaatggacaacctccgggaaagcggcagcctccagttgttttggccgaaaaggccgatgtcttactgaagtcacccggtgacccacttacaggacccctttccgagccctttcgaaaggaagggcacgcggtggcgtgcctgctctggcgctgggtatttgtcgagcaccctcgaaacgcccacgccattgttcgtggcgccatccactagggtgctcctggggcctaatgcttctgctgcgcgttggcatgcgaaggaccagaaatcgtcgttggcattggcgtaggtcgcagcgcagcattacgagcgttagatgggtacgctggacaaggagccagcgctgcttttgacagtttaagtatgcaacaggaaaaggtttcgaccaggatttgctcgcatctgagcggcgcgcgcaccgagaggacgacaacaacgaagatggcttccttcgaatgacgcattgtcgcgccattgcaacggacgaaagccgctcgcccacgacagcgataactttggggtttccacgcgcagagagcaccgacgcgtcatataaggcagacaaatgtgcacgccatcctggtcgcgtcaactacggacttctaagtacttaccgggtaaaagtctatcggcccgcggggcagtggcgcaagatctgccatccgcagtgcatggcgcatcctgcccgcgaacgtgatcaagcgcgagagcgtccagtcgttgccagcggcttggctacatacatgttgcggcaagcaagcatgaatctaatgccgccatcaccaccgtcctggcagaagcttcggtcgcagtgcagtccagaagctgtgttgcaattgcagtcgattgtcgataggaatgcaccacctcgacacgaatgcaccacctcgacacggctgggtgcgcgacccgtatgcttgcgccgctgttatttcggcaaatcagtcgcagctgctgattggctgcgcgggcggttacggacgagggacgagggagagacccgccgcctatcgagtcagcgccgagccacaggacagcaggcagggagggaaacaaccggccggagcgactccacgatcgccgcatcaggcagcaggcaggtctcgaggcacacggagactcgccccgcgcaacaggaaggaaggaaggcttccccgcccacgccccgaggttaactccaccttacaaccgagccaccatcatggcggaggacgctgctgctgccgccggcggcatgctggacaacggcgccatggtctgggtgccgcacgacgagcaggtctggaagaaggccgtggtcgtgcgccgcatggaggacggcgtgagcgccgaggtgcgcctgcagcccagcgaggacggcgagtgggacaaggacgacggcctgcagaaggtcgtcaacatccgcgacatcgcgcggctcgccggtacgatcttcccatatatttatgtactcacctctctaaaccagctttagcactagtttaaagttggtttagcactatcttaaagtcgggttagcactaacttaaaatttgtctgtgacctgaaatatcgttgtcaataacgcaggcgaggtctcggacgaagccatgcctatctgcaacgtgttcgaggcggacggcgccaacgacatgtgcacgctcaaccacctgcacgagcccgccgtgctcaagaacctggagctgcgcttcgccaagaaaatgccctacacgtacactggcgccatctgtatcgccgtgaacccgtaccagtggctggacctgtacggtcgcgagctgtaccaacagtacttggagcagccccgggactcgctggcgccgcacccgttcgcgctgtcggccaccgcctacttggacatgaagcggacgcaggtggaccagagtatcctggtcagtggcgagtctggagctggtaagaccgagacggtcaagatcatgatgaaccacttggcctcgatctccgggggtggcaaccacggcacgaaggtcatcgaccaggtgctcaagtccaacccgctgctcgagtccttcggtaacgccaagaccaagcgcaacgacaactccagtcgcttcggcaagttcgctcagctgcagttcgacaacctcggatcgctcgttggctgtctgtgtgagacctacctgctcgagaagagccgtgtagtgggtcagacggagggcgagcgcaactaccacgtcttccaccagatcttctgcctgccggaggagcgcaaggccgagctcaagctcagcggcgacgccaccaactacaagtacgtgtcggagggtgcggatgccgagctcacaggtatcgatgacgtccagtgcctcaaggagacgcaggacgctctggatactattggcatctcgacagacgagcagaacgccatcttcgagattgtcgcggcgatcctgaacctcggagaggtcgagtttgaacagaacggcaacgacagcgagaagtgccacgtcagcaacgaggacatcgtggacaacgtgggcgctctgctgcgcactgagagcgcggccctgcactcgacgctgctggagcgctcgatcacggccggctccgagtcgtacacgatcccgctgaacgccgagcaggcctcggacctgcgtgacgctctggcgaagggcatgtacactcagctgttcgactggctggtgcaccgtatcaacaaggctatctgctccacgaacaacgtgaagacgcacatcggtctgctggatatcttcggtttcgagagcttcgaccagaacggcttcgagcagctttgcatcaactacgcgaacgagaagctgcagcagaagttcaacagtgatgtgttcaaggacgtgcagcaggagtacgtggacgaaggcattcctcttacgctcgtgacgttcgaggacaaccagccgatcctcgacctgattgaaggccgcatgggtatcgtcagcctgctgaacgaagaagtcctgcgtcctcaggccacggacaacacgttcgtgagcaaggtgctcgacgcttgtagcgaccacccgagcatcgagaagaacagaattaacccgctggagttcactatccaccactacgctggcgacgtgacgtacaacggtacgggctttttggagaagaacaaggacactctgcctaccgacatggtgcagctgctgtcgggcagccagaacggcgtcatctcgggcattttcacccccacgcagaagaacaagcgcaacagccgcggcaagaacggcaaggagggccgccaaaagggtttccttgtgggtaataccattgccggcgctttccgcaagcagttgtcggagctgatggagaccatcaacaagacgtcgtcgcagtacgtgcgctgcatcaagccgaacgccaacaagagcgccgtggagttcaaccgcgttatgattgtggagcagcttcgatgcgccggtgtgattgccgccatccgaatcagtcgcgcggctttccctaaccgtctgcctctggtggagttccagcagcgtttccagatcatctgcccgtcggctctgcgcgatgccgacccttctgaaatggttgccggtctcctgaaggagctgatccccgacatggctaccactatgcagaacactaagtttgctgtgggtaagaccaaggtgtacttcagctcgggtcttctgcagagactcgaggaccgccgcaacgtgatcctcaaggaccacgccatccttattcagaagacgctgcacggctacgtgcaccgcaagcgcttcctgcgccagcgctccgctgtggtggagatccaggcgattactcgtggtggtcttcaggcgaagcgttaccgtaaactgcgcgtgagcattattaagctgcaggctatggagcgtggccgaaagcagcgcttcctgtattctctgctgctcgagcgtgtcaggaaggagcgtgagcgtgagcaggagcgtctccgcaagatcgctcaggaggaggcggccgagcgtctgcgccagaagtcgatggaggagcgcgaacacagcgacccccagccggtaagcttctactttggcgcaaatgttatgattgcgacctgtttactaaggatttttttgcgtgacaggagcctgtggaagatgactggagtgacgaaagtgacaaggaggatgacatcgaggcaagcccgtctggacccgtgtcgccgcgtacgctccgtgccctcacggaggcggcgtccaaggttgccgaggctgagtcggccgcgcgcgatgccaagtcggctgccgaggctgctctggagctgaaccgcgagctggtggcccagaacgaccgcctgcgctcgaccctgtcgtccaacgtggctgagtacgctgacgctgagctgctgcgtgagaacgagcgtctgaagcagcaggttctgcagctgcagacgaagctggtgcgctcgcaggaggtgtctctgatctccgccaaggtggtggacagccgaatcacataccgtgagggccgacagttcgtcgagtacaagcttcagatcgagaccaacacgcgtggtacgctgtacgtgtggcaccgctacagcacgttccgtaacctggctgccacgctgcaaaccaagaacggatacaagcgcaaggagatcccggagctgccgaacaagcagcttttcggcaacttctccgagaagatcattcaggaccgtgtggccaagctgaaccagttcttggaggctgccaccaacgccgagtacctccagtggggcattcgtgtggaccaggacacgtgcgtgtacaagcgtcgtgtgaagaacgcgtcgcgcgagagtatttctactgccagcacgcactcgtcgtcgccgcgttcatcatcacgactgtcgatgaagtcgttcagcttccgtcgtggcagtacggctggaaattagactgcttaaaggtgtaagtgtatcgtgcagaagcgcgagtggactaaagaacaattgctctgatggttgcgcggcggccccaatcccgcctgatgaacggctcgactagcgagtcaagggacgggaatgcagtatcgcgtgcgattttcgtctgcttcgtggcgagaaacttcagagctaaagcgttgaagctgaccgagtagcaacagcaagaaagtcacattagatggaagttctgcgtaatgcttttattcgctcactcttgatgtctgctccattcagtcggtttgcgttgcttgcttggaacacatcgaactcgcacgcgagcagatatgtgttatgacattggagccatgttgtgaggccgacgatcgcccaggaggaacacgcacacgatgaaaggcgcagtcaggcatcgtcctcgaactgcgccagtatgtatcccagtttctcgaacttcatccactcgctcacactcatcgaaactgtcgacggagaaaagtacttcatcatcgcagcgagctcgcgttggcgtgggagcttcacattgacacggccttggatcagagcctctcgtagaccctcgttctcaatcacccacgacgggatctgccgcgcaacgagcgctttcgccagcagttgacagcccagagcttcatcttccagcgagtcaacgacgacttgaccctgctcgatgtccttacagaggtacagcgccacctctgcgcgcatccagacgtcgacgtccagcgaaagtgtagttggcgtcaagtcgatcatgagccgtgcgactttgcgtcgatcgagcgactggacgtcgtcccgtcccaacgtcagcagcttccggaagttggcgttggtgatgctccaggacgggaagtcgcatgagatgaacgtcttggcgaccagttgatagtagtcgtagacttcggctgacgttcccacggtttccggcgctacgcggccccgttgtagacggtttctttgacgtctgcgtgcgtcgctggcctcgcgttcccgctccgcgtacagtctccagcggcatcgcgcaggttcagagagttctggacagcgcaccacatgagccatgagcgtgctccccggctgcgcgttgcggaactgggcctggcagtgcaggcactcgacgcttggacgcttggtgctgctggggatgacgcggaactccgcgcggacggggtgctgaggtcttcctaccatgacgcggcaacttggagaatgcggagtgcgcaagattcggcaggagtgatggtcagttagttgatgaacttcaacttcaactagctgacaatcactccagagcttcgtttgacaggtacagtgcaccgcgtactggttgaaggcacgagctgaccccgttggtgagcctcaccacttaccactgcaagtggtttcagtgggaatgttcgcgcaccaaacgttgtttgagctccatgagatgaggttcagtcgcgtttttgccaagtagagcgcaagtagcagtgcaacaggcgacgaggtatggagacacaacgaagcgcaagtcaccttaagagaagcagccacaatgggcgttggatgccacctcctcctcctccatcccctcccggggcgagtcctgctgtgaactgtgtgccacaagtcgccgaggaggtgctggagctcaaccgtgagctggtggctcagaacatttggctcagagagcaactcaccgctggcgagaccaagaacgagagtgtcgagggaaagaaggcagccgtagacgagcagttgcgactcgagaacgagcagttgaggcggcaggtggtggagctggagagtaaactggcgaagaagaaggaaattgtactggtgtcggcaaaaatcatcgagagtcgtatcgcctaccgtgacaaccagcagtttgtcgagtatatgatgcagcttgagactgatagtcgtgggacgctgttcgtgtggcaccgctacagtacattccggaagttggccgagacactgcaaaaccagcaaggaaactcacgaaagagcgtccccgagctgccatgtaagcagatattcggcaacttctcggagaagatcattcaagaccgcattatcaagctgaaccaatttctagaagcagcaaccaaggctcaccacctcgagtggggtatccgtgtagacgatgccacgtgcgtgtacaagcggcgcattaagtcaccaactcttccgacgtcagcgttgcggacaaaagcgtggacgttgcccaccaaaaactacgacgaacacgactacgctgaagttgtgtcagtgagggtcgtgggcagccaaattcggcaccaacggttcatcgagttccagcttcagataaagacggacgttcacaacacgttgctcgtgtggcttggctacagcgctctgtacgagtgggcggaagcaactggacgagagaacccgagtacaaaaatcccaactctccctaaagaggagccattcggtagctactcaaaacatattcagcgggagacagcgaagctgcatgcctttttcaagaaagttgtaaaggccggcgatctacaatggattgtccgcatcgacgtggacactttcgactctaagctccgggtgaacgatgcaccgccagcgtacgagcaccagccggagtctgccagtcctctggcctccatctccaagctttttcctttaaggtcaatcgtgcagcggcagcgtaagcgcagtgacgcgcaactctaccaacgcaagatggctcaagccagctgaagacatcatcgtggggcccgaacaatgcctgggccatctatcaattgtagtagcgtacaggtcgtgagatcatcagcacagtagtttcattccatgaatcaaatcctgttgtaaacatgcattgctagcacactcgaagacgtcatcagacttgccgatgaagttgcgccactaactccatttacgctgtgcgcaggatgatgtgcacgccgctgtccgtgtcaacgacgtcgctcagctcgcccaccttcagcgcaaacctggcagtcgcagcaacaggaaggacttcgtcaggtatccgatctcatcagctgctaaatgtgtacaacagatactcacgtggcatcctcgaagggcttctgcatcatgccgcggccgaacggtcccaggtctccgccgcgagtaccgctgccaatagaaatccataaaccatgagcaacatcatcccttcacacatcaataggccagctacgcgataaggtctcgcacctgttgcagtcgctgtactgcaccgccagctcgtcgaacttggcctggcccgacacgatctgcgcgcgaagctctgtccaatacaacaaaacccatcagctttctcctcgccgccgcagcaccagtcagttgcggttcacagtacggagcagctgggcgatggcctcctccttggagcgcgtgatgttgttcgacagacgcgaggctgcatcagacacaaacaaaagggtcagcagatactcactccccacctctgttcctctcgttatgcgtaccggggcgacgcgagccgatgtgcttgatcagcaggtgagacgcgcggacttgttctacgccatcgcacacacacagcattagatccacacacaaagaagagagcaccaccgaagcacgcagcatcgcaccggccattgttgtcgttgttgcttgttgtcgtattgaagctcctcgaattcggggggatggatcccaggcgcacttagcccgcacttagtcagttaaatggttgaacttggtgtgtcgcacatcatacccgttacaccttgacgcgcaaaagagaccaacactccaagcagcaatcaatccgtagccgcacacccgcaacttccgcactcgacactatgtggacgcaggacttcgtgcgcgtgctgcagggcgccggcaaggtggcggagcagctggcgcgcgcccagggccccgaggtggcggccaagagctcgcagctctccaagcacgcgatggagctggcgcgtctcgtgccctacttcctcaacggcgagggcgctgcgcctcccacgccgcccgctgcgccgtctcagcccgagcccaagacgcaggagaaggcgccggtgctcaagcagcaggtggaggcgcctagagacgcgcccaagccgcaggagctcaagattaagacagaagttgagaagatcaaggcccctgagcccgtgcacaaggtccccgagcctgtccagaaggccccagagcctgtgaagcagaccatcattccgcctgtggtggaggaagagccgccgcgtcgcgtgtgggaggagaagcacgtgccgtcgtcgccgctgtcccgcatcctgggcttcggcggtctggcggcgagacttgcggtgggcacggcggccgagatcgtccgcagtggaggcatgaacgggacgtacaatgctctcgtgtccgactccaatgcggagaagctggcggaaacgctgtgcacaatgcgaggtgcggccctgaagctcggacaaatgctgagcatccaggatgaggccatgatcccgtccaagttcgctgtggcgctagatcgcgttcgcgagaagtacgatgtgggtgcgttgaaggtgcagattgagatggtgactaacaaagtgttgcttgttgctgctgtgtagtgcgcacgtgatgccgaaggaccaactgcaccagcaactcgagaccgagctcggtgaggactggcgcagcaagtttttggaattcgacgacgttcccattgctgctgcgtccattggacaggtatcatgtttgcatgaacttttaattattgttttggtgagcagtgttgtaatatgtatactgctttggctcgtatccacgtcgtgtaggtgcaccgcgctactctgttgaacggtgagcgtgtggcgatcaagatccagtacccaggtgtggctgagtctatcggcagtgacttgtcgaacttgaagaggctggtgacgtacaccaacattttgccgcgcggattgtacatcgatgagatcattcgtgttggcaaggaagagctcacagccgagtgcgactacctgaacgaggcagagaaccaagagcgattcagggagctaattgagcagagcggaatgggtgagaagtacgtcgtgccacgagtgtaccgcgagctgtctacatcgcgtatcctgacgacgcagttgatctccggagttgctgtcgataaggccgtgcacctctcacaagacgtgcgcaacagtattgctcgtcgcattctcgagcttacgatccacgagctcttcaactggcgcttcatgcagaccgatccgaactggagcaatttcatgtacaacgcgtccacggacacgatcggacttgtggacttcggcgccgcccgcgagtatcccaaggccttcgtggatgactacttcaacatcgtgtgggctgctgcaaatgaagacgagaagaccatggtcgactattcgatcaagatgcatttcctcacaggcgacgagtctcctgcaatgatgcgcgcccacgttgctgcaggtatggttgttggtgagccattccgatcgcacgaaccattcgatttccacaagagcaagctcaccactcgactcggccagcatactgaagtgttcatgcacggccgtctgacacctccgcctcaagaggtgtattccctgcaccgaaagcttgcgggggcattcctgatgtgcatcaagcttcgcgctgttgtcccgtgtcgggatgtgcttgaaaatgtgcagcgccagttttactcatagatggagtgactgtaatgagcattagacatcccaacaacagcttgctctacaagaaagaccggatcatcagacagcaccaccaaaggcaaattatgcgcggaagaactatgactttttagaccccggacgatcgtaagttgttgttgaggagtacttggaggctatacaggctaaagctctgcaagttgatggaagagccgagacagactgcagtgaggtaacctcaatgcaggtgagattaccgctgcattgagatcgctcatcgatcaaacaaaatcgttgcttgtggagttcgttgaggtacgacccctcaggggttatgttatcggcaagtgttcaagagattcatcttctgaccagcagtctcgtgcttgtagcggggttatgggatcatgaacgaaggccactgacttgcggtatccctagctgaagctgcttcgtatttccccggaggaaagccgaggaagcagcgcggttacaggcagcctttgctgagtttgctatcgaagttgatagtgatctgggtgctgtgttgaagctctcgatgatctggaacgcagcgtaagttcttaccatttctcattccaccagggggtagccgatggtaatgtgtacgttgttctctattagaaacagcagttcaggtggtgcaagtacgataaaaagttggattatgcgcttgagcagaactgcaacaccagggccaccgcggcctggtgtcgcgtttgaaagccacgcaccagtcgatgttaagtcactcaaccatggctgcatcaagagtggagagagaacagcattgaaaggtatgctatcgatgtctgagttgcttgatcgctaagattgagcctccatgtttaactcctttcagcccctgatgacagaagtgctagtgcaagtgctagtactagtacacgacgggtggtagctcaagcgactggtctcaaacttccgtatacttcccattaaaccatcaaatgccgcgacatgagctgcacctgacgccagaaacgcttgctatcgaagccataacgtcgactgaaacggagcgatatattatgtggggttgctagcccctagtgtggcaaaaatactgatacagggcgtcggtggagcccataacttagattggtgtggtgctggtgctgcaggctggtctctctagagtccgatcatcgtcgcgttcttgcagatgaagagcatgaagcggttgcggcactctcggagctggtcctgcatgtccacgagggcgaagtggctgtagtgcacgcggcacaggtactgcatcatggcgagcatctgctggcacatttcgcgaatctgcgggacggtgagcgcttgcgacgaggctatgagctctccgatctgctccagtgcggcggcgaagctgcgcacgggcgtgtcgtcgcagcgcaggtctcggcagaggtcggcggccacgaagagcagcagctccagctcctcgcgcaggagcgtggcctcctcgagcaccatctcgtactcgagctcagtccacgcgctgctgcagcgcgggcgcttctccctgcagtcgtcgctcagcacgatcttgcgcttgcggccggcgttcacgggcaggctttgcggcgggcgcttgtctacgagcagcatgttggtggcgtcgaagctgacgggccggaagagggtgcgctgactgactgctattgttgctgttgctgttgctgttattgctgtgccgcgggtgcgatcgacagatcactttggtaaatgagctgctgccgtcgactcgggcatgccatcaaatttttcgggcagggcgactgctgtgtgtcgacgaaaaattggcgttggaaatgtgccgactgggtctcagatgggataaaaggggcgtaaattggcttaattttgtcttggtcttagtatgccaaatattcacttgggtttagtatgctagatggagactgttgacttttttagatgttggcgacgctatttctggaccgtgaactcttttgagccgcacaggtgaaggtgaaaaatcgcctcgtggctcggtgggggctgacagcgctaacgcaggtgggttctttcatctgaccgagttacactcgtcggatgggtgggtgaacatctgggccaaagtgctgcgaatattatcggagacggcccaatttcgcgcttcaacaggagaatgcgcccgtatcgcatcgggaaactttttcacaagcgcgcaggcactttttctcaagcagaatcctctcgtccgtactcgtatctgatttcgatcgcgcgcgcttgcgtcttgcccgagcttgcccttgacctcctccacgcccgcggtgcaagccgggccggcagcgctacgtggacaatgccgccgaagccacctcgctcgcgaggaagcgacgctgaataacggcccgacgcaagacgaggctacagtgtacagtagctcgtcgtccttggcgactaatttttgcaacgcgacacatgggttgtcgttcgccgctcgccgttgtcgtggagcaagtgccccaatgcaccgctggccatagcgggctgacgggcagcagttatcaataccggtagcgcccaccacgggcggacaggacttggctgagctcgtcattgcccgacgcaggtcgcggatgcctaggccccacaccgcttggccgatctatttgggccgtggcgagtcgccccgtggttcgtcagaaattttcagccaggtatcagagcgatatcagcggacaccacgtctgcgagagccgctggaggtgccaagacgtcgaggacgcggagggcgagcgacactctcacatgcgcgcgtcgattttgccgccggtgatccggagcggctccatccgttcggcaccgccgcatggccgagcgaaatctctctgcaattcggtgagcagcggcaggtccgccctgcataatcgaacgcgcaaaaactgcaacacatgcaagctcttgtgctcgaagttcgaatttggaggccaacgggtggacgccgtgggacgtcctcgcgatacgatcttagaaattttggttgaatcggcggaaaccggctaccgactcaagtagtcagaacatggctacatgtaccatcgcgtggatgagcgccgtcggtccgtaagtcaggctcggctgaaagttaccaacgtacgaactcagcaagcaagcaagcactgcccgcgggcccctgtcgccagcggttggcatcacgctgcagagataaatttacaaacgctacgtgctcccttatggcaagtgcttaccgacgccgcgtccgagctttgccagctctgtgcagctgcaatcctagttggcagctaatggtggtggtggtgcctagagctcgaaaaatggtgcgggcacgacgtgcgccgttagagagctcgagcgtacatgcgcaacacaaacaacatagacacggaaacgctagcggtccatgtggtggatctgacaaaacagctctgaacttgataatgacatcgcgggcaacttgcggcgcgctggcgtgaaaggaagacaacccaacgtctgcctcgaattgcatcggataatacaagtttggtggcgggcatatgtgaaacctacattatggatgccgcaatggtttgcgtgcccaaactcgttcatgctcgattcggcggactattgactttggcctaaaagttcagcctggtgcccaccaagtgtagacttgcattcctgagcgttttggggtttgggtcaacagttacggaagcgggctctaagagaaaacgtgtgaattcgcgatcgctgtcgcccggagctcagataatccaacacgttgcgtgcagaatttttgcactcgcagccgctcctgttctgcggcaagtatactttagtcaaaaagactatatcaccattcgcgatgagatgacgatctagccactgctacatgtgaaagtttgagtacacgtaagaagttcgcctcttacattttactttagtccggcaagaatttgtttatcggcagcatcgagattatacgcgttcgatgcatcacttatagggattggttccatgttagcgttcgcatcttgagccccaaccattccaaagcatccacagcccacaagtgtgctgacacagcgatctattgataatgcatttgaaatcaaaacgcaatccacccctacactctatctgcgcgatcccttcttgccctgcttgaccttcctcgtgacgagcggtctgccctgcatcagaatatccaacgcctttcggttcaaacattcgccggtggacgtgtccagctgaagtcgtcgtccacccagcacaaaactgtacgcgtccttgccgttgtgcccgagcaacttcaagtctgctccccacgcaacaccccaagccaaacaactatcaacttcaatccgcccaagaaccctgcactttgcaacaaccttcactcacctttcggcgaggcctccagcacctccttgaccccgacgcccatgaccgacacccgcacgaactcgttggggtcacccatcctccggcacgacacaatgtccgtcaccactttatcgcacagcctcttggcgccaaagaagacggtcatcgacgcgctgcaaatggttccactggtcgcaagcaccttcaaatacccgccaccaactcaatcagtcacctctgcatcctccatactcctaaaagagctcttcgcttcgattcgcacctcgagcatgttggcgctggcgtcggcctggtacacgaggctgcccgacagcagcagagagcagtacatctggaagcggctgccgggccccatccagcgcatgaagtctcctccgcagttctgcacgatgggcgtctcatgcaccttggtcttgtccacgggcactctacgcaccacacccacccacccagttagttattagctatagaacggtagaatccactacccccaacagcgctctacgtactggatcttgggcttcgcagcgaagcatcgcgtctgcgcggccagcgagcggcccagcagcggcgtcagccttccagctcgacccagcattgtctattgtctatattgcagtgtgtgtggtcgagtattattttctctctctccaccaatcagaagccgtctctccattattatttttaacaaactcaaaattattctacaagacgccttttataccatggctgggccatggctcggcgcttcgacccggaccaagaccgcgcgcctgccgtggctgctgctcttctggtggacgcaggcgctgctctggctgcgtcgctggctcaagaggccgctcatgcggctcggcatcgggtccttggacgacgtcgaggcggtcccaagcgccgagaacgaggcggacgacacgtccagcgctgctgctgctccctctgcagagcttcaggacgcggcgctgccctgtggcctgcccaacaacggcaacctgtgcttcgccaacgccgtgctgcagtgtctggccgccgtcccggtcttcctggagagcgtggaccgcgcactgcgcatgcgctcgcagctgcacgtggtgcggcagcccgacgacgctcaggcgcagaagctgctggtggccgagacgctcgtgagtctgctgagaggcgtttccccagtggaggaagaagacgtggagctggagctggagctggaggctgaagcggcgggcgtgagacgcagaggagaacgacaggacatacgcaggaacgctagggacgacaaccagcagcgcatgcggcgcttcaggtccgctgcgagtcggtgcagctacttggtgtcgagtgctgcgtccagacaggagcaacaggacgcagaggagttcttgtccttcttgctggaactgctgcacgatctgctgcgggttccagcgcagccgcaacgagaagaggaggaggaacgccagcagttcctgcaggcggagaagtggtgtctcaagaagcttaaaagctatgacccgaacgacccgaggtcgtacatgcacgcagttggtatgtggtgtggtggtgtgattggtgaactggtggcaatgcagatgaactgacatgtttcgtgctgttggtgtttctcgatgcagcaaacctgggcgaggcgcgttggagccatttcctccggcagaatgcatcagtgattacggatctgttttcggggcaaactgtgcgaggctcgcaatgctgcagttgtgctaacctcacgtgtcttcacgaagagcaacggtgagtatagttgtttcgacgtggtttggtctagcagaattggcttatcgtgctcggtggttgctgcgaacaggattatttccctagcgatcgcttcggggaagggcgaacaaacgctgtccgagtgtctggagcactttcgtcaccccgaacagctcacaggcgagaatcgtgtgtactgcgatggctactgccgcgccaagaccacacgcctcacgcaaattctgctacagcgtgtgccgcctgtgctgattcttcggctgcaacgattcaagcatacgtcgacgagaggacaaacagagaaggtggatacgcccgtgagcttcccgtgtgggagcgatgacctgctggacatcacgatgaatgcatttttcagagacgaagagaagcgcgtcacgttccagctggctgcagtgtgcgctcatcttggcaactcgattgactctggtcactacgtcgcgtatgtgcggcatcaccattctcggcaagatgccgccgagtggcttcggatcgatgatgacgtggtctcagtgcttgacgaggcaacatttcgaaaagagacgctaacgtcggcttaccttctcttctacacactagtcacaaggtgacccacgaaataaacgtttgttgtcaaatacaccacagttcaatacttcaacggaacgcagataaaaaattcttgcgttgtggaagtcatatttcatgttgttagatagctatttcgtatagctaagttgttgcttcgcagcgttggcattcgcacaggcgctcgtggatattcacacttcggcttacgtcacgcattcagagatcattgcggcattgcggccagcgaaccatgcctggcttgcaccccgggtatccgatggagcggcacgccggccaatcgttggcgccaggacggcagtaagcgttcacgtcgtcgtcttcaaccagctcgtgacggttgtcatcggatccagactcgctcccgcttccgcttccgtcgtattcaacgcattcggccagcttacggctgttgccatagcgacgaccactgtcgccggaaccagactcactgccgctcccatcgtcttcgctacgcaagttcgctagctcagtcatcgttccggtcaggtgctgatcctccagatggtccagcccatttcctacaaacaacacgatagataagcacccgaggttgtatagcgccaccgtagctacagcaccttcttcagcattcaccaaagcgcccacgatctccaccaacaccattaggcttgttagaaccttcattgttcaccgagaagagtttttacttcgtccttggctggtcgtgccggcgcgactccatgttagaaaccagtcatagcagccccggagttaatcctcgaaaatggcacgaacaattcaacagaaattccagcgaaaagcacaatccttttatgcaaactctcaacactacggcgtcggaatgggaaggaaacaggagcgcagacctcatacaaacgaaatcggagaaaaagcctaccagaccaaggaactctacgacgccgaggtgtagaagtggaactggtggtagtagtccagcacagcagtcgtgccaaagcggaatagcttgcccacgagtggcacgtagtcgagcacgtcagcagcctgtatacgtgcatcaatcgagcagtgagtacacgttgctgataacttttcgaaaagcctcgagctggaaatatttacctttccagtagcaggcttcgtgacagttgcaaacactgggtcgcgaagcaaatacagaagaagagccatctacaatacgcaaacaatttgtaagcactccgatagactaatagcacagcactccgtagaagtcaaacaaacctttcgggctgcaatttcgtccttcgcctcgtcagcggtgacagtcttcttcggttccaccggtttgacagctgcagcagatagcgccaaactgcatatacataaaaggcagcgtaagccacacgacccatttttgctacagtgtttcatccggcaaagacgtacccagacagttcaacgagaagcgatgcaaccacaggtgtccacgaggtctccggtcgacgacgacgcagcagtgcatacacgacaggccgcaaaatgtggcagatctctcccgctacaaggaggtcctctcgcaagccttccgcaacttcaatcgttgcgtcctattcagcataacacacagcatggttaatcagcgcatgcaacgagaaggtgccgatttttcctctactcacctcaaacatgattttgttgggggcttcctcgacactcttctccttcatcggttcaggctccgacaccgcagctacatcatcgcaacgaaaaagataccatgccaacgacttagcacaaatgaagctttcaactcggccactcggccactcacgttttccgaaggtcttgcccgtgcgggaaccaggctgtttcggcttcttgaagcgcgcgaacgccgatggccgaggagcagattccacgcccttgtactgtatcattgtagcagggaaacctgtgagtctaaattcgcatgacacaactcaccagtaggcccggcccactcactttgccgccacggatcatcatggcacgacggcgctgtgcaagcagcacgagacggagcacactcttcacgacctccacccacacgatcaggcgccacttgcccacgtctccaccgactcggcgggcgacgacttccgccagcacttgcacgtgcgagatcagcgacagcgggacccgaaccaaccgcgtcagtctgcacggaacagaacagcagcaatcagcaacccagtcacattatgccaccacagcaacttcaactccagacgcacttctggctgccggtcggcggctcctgctcggtattgcccttcttccacagcacgtagtcgtggtataggtgcagcagccccaccagcgagtagccgaactgcgtggccacctccggctccatcacccgcttctgcagcatcaagcaagccgttaagaaaatctataggtaccaacaataataacataaaaatctttcaagatctctcgagttgaagccacgcaccggcaccagctgcggcgccacgtacagcgtggtctccacattgcgggccaggcccgtgtggctgcccacccacgcctcgtacgcggcgagaagcggcgaggtcttggcgagcaccgagtcggaggacgcgggagcctcgggggagggggagaccacgcgcgtggtggtggtcgtggtgcgcgcgaccgtcttggtggtctgggagtcgccctccgtcgtcacgtccgtctccaccgtcgtcatcttgctctcgtccgccatggtcgatcgatccgcttgtggtaaggtcccgccggtgcccgtcggaccgaaggcttggggctacttgaacccgcaacgttgactaaacgatttgtaggatgcgtcctaaaagtgtaggttgatgtagcgatatgtgattggctcatagcattcaatgtggtacttccagcaatggcgctggcgatggtgatggaggcgtcggacgcggacgccatctacgcgctggttaccgacccgcagcaaattgcatttctacagctagagtgtcgcttgtatggttcacctgatggggtggctccaacagcggctgcggcacccccacgattgcggttggctctggaagagatggcgctgggggtcgtgaaagggttccttcgactggagacgccgggagtggactctactgtgtatggaggtgtggaggagaagagtcggacactagtggatcagattacagaagaattgagaggtgatgcatggcaaagagaggatattgatggtgatggcgtcacgtggagactatgtacgaactacttggatacttgttagttgacgtgcatctgtactaaaacgctatggttgaacacagcgtcacgacgtcgtactcgactgcgtgttttccgagatctgtgggagcgaggctacgtcgtgactttcggctcaaagtttggagccgacttcctcgtttacaaaggtccgacgcgggttgtgtacggaaggaagggcgagtttgctactgacggtttgtgtgttgttttgagtagatgaccccaaaaagacacatgcagtggctctggtggtggtgaaagactacgaggaagaattcgcgcgcgttgatctcgtgagcttctgtcgtgtggccaaaatggtgaaaaagaagcttctgttcgcgtgtgtgcggacaaacggtgaagacaagaagggcgatgaaaagaaggatggaagcgggagtgaggcacagagcgtcgtgtacatttcattaacgcatgcactgttggtgtcgcgccaggaagcgagtgcggaggaataggcatatccatatcctacctgccaagatggtgcaagtgacttatgagctgttaccacccccttcagtggagggcggggtcttcatgttcacttcgttctgtcggattttttgtgcgatcttcacgaggcaatcggtatcagcggggatctgcgtgttctggcgcaggtcgagtgcgacgagtgtgttattctgctgcaaaccctgcagcagcacgtctccatcgctttcggtcagagcgttgctgctcaggtcaagggagcgaagtgccgttagtgagtcgctgaggatttcagctaacgcttcggcactttccttgcccagcatgttactgctcaaattcaggttagtcagcgaggtgtgctcaacgagaccttccagcagcatgcgaccgccatcgtcggtgaggcggttgagccgaagatcgagctctaccaagctggtgttgtacttgagcccgcgactgaggtatctcccgccctctgcgtggatctggttatcgcacagcttcagcgtggtgatcacgctctcggggcctagcagtttggacagtaacctcgctccgtggttcgtcagcttgttgtgtgagagatcgagcgacgtaatgctggtgttcttcacgagccccgtcatgagcatccgtagcaagtcgtcgtctagcagattgctgggtagccacaacgtcgtcagcgagttcgacgacttgataatgtgtgagaggttggtcgcgtcggagatcttcattccgaacagcatacgctcgtacttcatcccgatctgcttgacgccgtaggtcactcggagcctggtcaagttgcgcaactgcgcacagatctcgttcaagtccagatgcgacaatagctggtcgatctccagggtgaaaatgtactcactggaagcctttacaacggccatcaagtggtcatgatcatccagcgatggatcgaagtcctccagtagatcctgcagatgcttctctaggaagagctgcttccacgtgagtccgtggtcggcgatctggatgttcttccactgcgtcttgctgaggcagcagcgcttccagtagttctcgtccgtcacattaggagccgtcacgcacacgtcgaggtccaacggaaggcgagccataacctccggtaggaactgacgaggcacattctgcgctttgggctgcagacggaagcggtcggagatgatcttgagacacatgagcagcagcgacggaatggctgaacccgaagcagcattcttgccgtcgctgactgccccttggccgttctggacgacacgagcgcggtacttcttcacttggtcggacaaggcacacacatccgtcgtcacgccgaccgtggaagcggagaccatggcgcctgctgctgctgttattgctactaaagtgactcttcccgcctcaacagattcgctcaggctcagcgtcagttgctggtgtacatcaaaatagcatctgcatgacatgacggatgtcatggatggatgtcaggacctcatcttgcgccctcccccagcaagatttggtaagttgccgcgaacttcaacttggaggtcagagtgatggtcacatggtttcccttggattccgcaatccatttcgctttccgcactcgacagcgcaagtggaagcgagcggcgagaagatggagaagccccgagcggatgaagcgagcgccagggcgatgctcatggcggacgacatcggcgagctgcgcaagtacatcggtgtgtgtggcccccgctccgagctttcttttacatgctcttcttgctcgtgctgacgagcgactcggttaccggtgtttctcttgcagtcgagatgatgcaggcggagatggagctcatggagagcatcaagctgaacgaacgcaatgtggccacggtgaacgcccgcatcaaacacttcaaggtgcgtcaaggagtccgaggttttaaatactgcgagacaatctcactgtaatctgcaggagttggtcgcacaagagcgcgcacgttacaaggcgttgaagggcgcgctggcggaggatgccaacgagcttcagaaccttgaggagaaacaagttggtacgagtggatgagttggtaagatgcgagaatgactgaagatgcgtacgtggacgttaacagttgccgaagccaagcatcgacaattccaaggtagacaggcatgtgacggggataatttgttgcgtatatatctaatgcttgtcgtcgtagacgctgtggcgcagcgggagagtgaagtgcaggtgctgcgctcgcggtttcagcagcagcgagccgctatgctgagcttgaggcaccagatcatggaatctactgctcagctgcagaagttgtcccagtctaaagaggttgtggagatggagacacacaaacgtacgcggattggaaggtaaaaagtgccatgatacttgactaacaacaattgtgttggattcctgacagttggtgccgccttgggtgagtgcgccgagccgacggaacagcggacttcacgtcagaagctccgcgcgaagatcagatatactcagcaattcatcgcccaaatggaggaagagacaagtcaacttgtggaaaagaggaccacgctcgaagccgaggtgctgaagtgcgagcaggaggctcacaaactgcgcgagtcaatcttctacaaagagaaagaaaccgaggtcttgttcagtcgtctgcgcgaggacactctccgtgttgcccgagaaaacggtacgtctggttttcagtgaaataactcgctacttctctaacatcgtatgtgcagggaagttggaaggcaagctgaaagccaagcgcagaaagtttcgactgaagacgaaaaacgagatcagctcactcaaacgcagaatctccttcatcacatctggtaaattgctggccatggtggctctacaagcaagtgtttgactgacaccattaacattatttcagagctcgaacgaggtcagatgacgaatgaggatgcgctgtctgtcattgacgcgcttagtgccaagcgcgaggcactggaagggaggtatgcctgtcctaatctttcctatgctcgctttgttttgaccgttcacgcaacttatctcggtcaggctccaagagcgtaatgaacaactcgctgttgctgaggtacgtatctcagcgtgttttcgagctactattgttactgaggaggttacgtacagggcgcaatcgccgagttgtcgagttcgatgtctgcaattggccgcagtggagaaaacttcgatagaactcgtcttcaggaagagttggtctcaaagcgcgaggatgctcgatcgtctcagaagaagctggaagagaaacaggtacggtccgatgattcactgcagtgagctggtattgtttaacttggcgtggacattggtgcagaatctcctcaaactactggatgaagaccacactaaagtaagtgcatcgttatttgttgtcgtgtgggcggaactaagcaaagtactttcgtagctgaacgccacattggaggatctcatcgctcagattgaggtggcaaagtctacgacagaggggctggataccgaaatcgcctcacttgcgaaagatattgagcagcaagaagagaaagtcaagagcctaagtgccgcggtgaatgaagcgcaggagaagaacgcagctcttaatggcaagcatcaaggacatcaccgcgagagcaagagcaccatcaagaagcaagtaaaacttcgccgcgaaagagactcgttactggaacaagaaaaagaattggcttcggagctccgccaagttgaaaatttgagtcgactcttaggcgagggcatcaaggttcgtaacagacttggtttgtcagctattgcgcggttgggatagctaaacgattgtgtacgcatctagcatggagcagagtatgcaagccaattcaaagaatccggcgctaccagtgatgacaaacaaaagcgcatcgagtttgaacttcgtcgccacgagcttagcttgcaacagcaatgtgcgcaggaagagtccaaattccaagacgaagtcgcagcgtgggatgacaaggtactgcacctttttgcatgtgttaaacaaggaggactttttacatggtctgtttgttgcggttgggcacagatcaaacagttggagcgacagcttcgaagtatttagtgcgtgacttcgagcaaattccttaaatgcatgatttcttggcaaagttactaccacattcttgagggccattctccgaatttgatgcggtatgcggctgatctttgagcatttagacgaacgggccggatgagagagggagcggcttcaaatacgcaagttgatcaactggcatcacaaacaaaggctcctggttcgctggggctttcactcgcaaatatctccgggactgcgcaggacctccccaagaaccaagtatgaaggccatgttccttgttttcgcgtccgttctgtttgctgcggcgatggcgtcgcatatgccggggcatatggagcacccaaagcatgctcggccctcgaagaagtactccggtggcaagcgtgttttggcaagtggtgaggacccaaagtttgagatcggagacgacgatgatcttggtggcgggggtgaccttggaggaattggaggtgttggaggcttgggcggcattggcggtcttggtgggatcggtggacttggtgggcttggtgtcattggtggagtcggtggcctcggcggcgttggagggcttggtggtgtcggctatcgcggtaggtattgtattacgcgtagcgtagcgtcgcttacttactaatgccttcattctctggtgtagcgctccgcggtgttgacaacgagctgacggatgatggggaggcactcggcaacgacgaggtcgttgtcgctggtcgacgtgttgttcgcggcggggttgttgttgctggaccgcgccgtggtccgtactattgaagcgccaagcgatgaagcggcgtagcaggacgtgaaaatgaccacacgtcgcacttatctagcttctcttttggtcttgtccaatcgtgcgtaacccaagccaaacaaatgaatgttgctgcctctggtagcaagccaatctgagattccgttgttgtgtgttggtatgctcaactatatcgtaatatgcatagcgaatccactgatgttttttttcaaaaggtaattgttcggtcgtggataacgcaaggatggaattgactcaccacgtctcatttttcacagtctctcaacgggctcatggagctctccctatcgaaactggacgccttcttcttgggcgtctcgattgcttcatcgtcgtgattcttctgccagcccccgggggtattcggcaaggaggagaggcttgcaatgcagagcggtcagggatagtcgagtttatgaaggtggtcacttcggttgcagctatcgtgttggaactgatgaaagtatcgggcagaatgggtagcgctggcgaccaaggtaactactgaagctatgtcgaagtcactttctctcactaactgcgattggtgcttgcagtccgcagagaacgtcgtgatgtgggcatcggagggattcgcagagacgacagcgagcaccggtacaaccgacgtgacgtgccagaatccagcggtgaagacacggaagagctcgagttgaccagagaccgacgacgtcgcggtcgtgctgggagaggtaacgcttccaccacccatcgtggcacgaccagaccctcttccaactggtggtgatgctgcgaaacaacaaacatcgactttgattccaagaatccgttcgttgtagtctatgttgcaacgtcgtggtatcaaccataggtcaagcaaatggaaccgtaattgcatcgcaaaatatgcagtgcatttctctcttcgtggactctcttgcacacttgtctccatcgctcagcttggcgcctattttacgaagcttgaaaaccttttgacagcgattaataggtaggacccaccccttcctgcttagttgagcttgagcacctcgatctcgaaaatcagcgttgagttcggctgaattgtacacaacgtcacggttaaggaagcagcatggatcaaaagtgtccttactctagtaaaatgcagctaccaacaacacaaaagtatttggtgaaaaggatatccccaggccgggaagccgccggcaccgtacgcgtagtccggcgtgcaggtgagtcgcgccgtctctccgagcttcatgccgagcacgccttcgtcccagcccttgatcacttggcccaggcccacgctgaaggtgaagggcgtctggcccgggtccttcgtgctccagaacttctgctgcaggtcgcggtccttgccgtagcccgtgcagtgcaccgtcacggacgcgcccttggtgggggtcggcccgttgccttccgagaggatctccttggtcacgcccatgctgtcttggtggtcggtcggtctcctttagtttggatcgggtgcgatagcaaagtgatctgctacagaaatgcatattttgtgttctcaaacctaaaataagcgatagcgtaggccttgaaggttgtcaatcaccttgtctggcaccttgcactaaactactgcagaattgcaccacaaagtaatcttactcatacagtattgccaagggcaatgtagatgaaggaagtgagcaaggcattccacagtactcactcgtgacgttatgccggaatgcaagctcaagatcgacagccttgactcgcttcaaaatgcatctcaggcaacgttgccttcccacccccgtgcagtgtacgccgcggatcggtacatgcattgcagcaggctgtagcagaaccgtgttgctcaaggcggagggaccacttgaagcggaccgactcgctggatttccagcagtcgggtcatcgacctcgcggctgcgattatgcccccagcgtctcggtggacaagatggtgagctgcaacatcctgagcggggcgcacgcggtccgccgtcgacggcccgccgcgtccgactggcggggtttcgtcgcctttgccgttccttcatctcctcgctgcgtgatgtccgttgtgtgaggttgtccagacgcccgatcccctgttttgccagtcgccgcgctcctttttctcccagacacagcttcaggtgagctgagcgccatccgagcgtcatcaggctatcggtgcgtgcgatgtcacacgcgccggccctgagaaatggctcgagcaactaacagtggcatctgcgccagggatcccccgagcatcacactccaagccatcatcgcgaaagcgcggcgcgcgctgcgctcccttcattgcgccatttccaccgacaaaggcgagaacgaccgagcgacatcgtggctagctagctaagaagacatctgcctccatttttgccagtcgactgatgcaattcgagtccgtccacaagcactcatacagcgatcccagctcggacgccggcgccacctcgccctcctctacgtcgtctccgcctccgcctcgcgtggacaaaccccacaagtgtccgcatcgaggctgcggccgccagttcaaccgcaagtacacgctgatcgagcacatgaagacccacacgggcgagaagccgcacgtgtgccccgtgcgctcctgcagcaagcgcttcagcacgtcgggcaacctgtcgcgccacaagcgcctgcacggcgtcatcaagccgctcgagtgcccggttgagggctgctactgcgccttcccgagcgacaacaaactcgacaagcacatgcagttccacctcggcagccccgtgcacgtgtgcaccatcggcaactgcggcaagaccttcagcaccacgggcaacctcaaccgccacgtgaagcaccaccacccgaacgagacgctgcgtccactgccgccaccgcagcccaacgcgccgctgttgatccacccgcctcaacagcagcagcatctccaggttcaggtcccgcaggtgcagtaccccgtggacatgggctaccagttcccgagtcctcgggtcatgaatccgcccatgaagctggtgccgccatcgttcgcccccggtgccgcccagcagtactacggcgccggcagtcggtggagcggagagtacacccgaccgagcccagcgcaggtgatgccgtctcaactgccgtcgcccgtcggggtgaccccgcggggtacacgcaacccaggcatcgccgacgtgctgtcctccatcttcgacgagatggagtacggcgcggcggacccggagaagccgctgcctgccccgccgcttcagccgcagccgcagaacctcctggacgacatggtgagcttccacgtcgcccacatcgagctataaaggaggacgatcacgtgttctatcctagtcgtaataagttaatgaagtttgccatgattgtggatacactcgatggtgttatcggatgaacgaacaacttgtcttccttgagaagaccttccaatgatctctaaagagcgtctcagtcgtatgcaatgcgcttttgctaaagcggtgccacggcacggaatgaagcaagcgcgagcagtgaaaacgcgatgacaaacatcaacaggagctgtcgggtaacagctcctccctcttaacttattttacttcgtactacatctaaaacacacacgcaagacgcttgctttaggacatgtgggagacatggaagttgaccatgtcgtcgaggatgctgatcgggctgagctacagcctcgtcgaagatctccgtgagtgcgtcgaccatctcgtccgagtgccaggtcgtcgaagcctggggcggcggcaaccggaagctctcgcactgctctggggtgagctgcgggaggacagagacgtcgatggcaggcggattggagacctccatgctactctccagcagaagtgcagtgtacgaggccatggactgctgctcggcgctcgtcgggctcggtgcactgaactgggacggagacatagcgccgctcgggaggtcgtccaggtgctggtgcttgatgtggcggttgaggttgcccgtggtgctgaaggtcttgccgcagtggttgatggtgcacacctggacggcgctgccgaggtggaacttcatgtgcttctcgagcttgttgttgctcgggaacgagctcagacagccctccacggggcactcgagcggctcgatgtacccgtgcaggcgcttgtggcgcgacaggttcccggacgtgctgaagcgcttcccgcacgtcctgacggggcagacgtgcggcttctcgcctgagtgggtcttcatgtgctcgatcagcgtatacttgcggttgaagtggcgcgcagccgggctccgtgcagcggtgcgccgtcggggtcgacggcttggctcgagtcgagtcagtagcggagctctcggtctgagacagcgacgccaacgcgaggcgttgcagcgcgagcgagctttcgaaagtggtatcggtggccggcatgatgcgtatgtgagccagggaaagcaaagtaggcagggtacaggtacagacgactaatgcgaggcggtggaacgacggacagcgcgcggtgatggaggcaagcgcgacccgacgcccgtgctggtctcgtcgaggtgaggtgggacctcgaaaaggaggaggaatctccagtcgcgcccagctggcccctgagatgcacgcgcgtacgtcggcgaaacgtgtgacatcggcggcaccagcgaaatgcctgctactagagaaagccgcgctacgcgtgactcgttgtcctttgtgcgtgtacacttcaaaggaatccgatcgcctcacgcggtgatagatgaccatgctgcactgcagcagccggcttgtctaaggcggacacagtcacgcacgcagacgctgacatcttgctgctgcacgcgcgccatctggctgctcgtcgcccattgcgggaggcatcaacgccgcgttttacgattatgcccccgtcgtgtccacttttcaggcggtcgaagttcgaccgcctcgaaccggggaccggccacttgattgaaaagctcgcggcgaccgcccgtgagccgggagccatctcgcggacagaggagggctccgttcatcgtcccaagcgcgaacggcaaaggcccgtgcggaatgctcgcgaggttttcaacgcacgcgaccgagcatcgatcgcagctgagtcgtgtgtggcgcaagatcactgctggctgcggatgacggtggtcgcagcagctcgaccagcgggaggctttcggagcgtcaacatgtcaaataaacccccacgatcgattcctgcgctctgtagcggtgctaccgctagggagaacatcgccgaacctcccaacgagacggactacgggccgatctcgagagtatcaagacgatgggaggcggcggcggcggcgctccgagttgcaggcgaagtctgcactccgcggcgatgggcggtccgccctctacggacgatgggtccaccgacgtgaagctttcgctgtccgcaagagagccgggtcgccacagtactcgggcgagtgccactcctgcgcgtgtgtcatacgctgcaaaggcgcaaagttgaagcgttgatgtgagcgtcaccgctgttacagcctgcaatcgctccgtcgagcgtccgccgcccgtcgtctctggagcgcacgtgcggcggaccaaggaaagtcaatgcggcggcatggccaccagcgctctcgccgctgctgcgaggcgacaacaatggtcctccgtcaacacactgcacgcactagtgtacagcatagatcaagagccttaccttgtttcgctcggctggatcgccgccgttgggcttcgaatttgggtcaactgggatcgagcaaatctgctgcaggctactccacgccatcatcacggcgacgacgcgagcgggcgctcactttaccagttgcagtctcccaaccagccgctggcaccgccacgcagacagcagtctcgatacaactgtattaatccacgcatcatcgatggtggacactaacgccgaagcacctgccggcgcgcccgaggacccgatgttccaccgctgccccgaccccagctgccgtcgccagttcagccgcaagtactcgctcagcgagcacatgaagacccacacgggcgagcggccgcacgtgtgccccgtgcgctcgtgcgccaagcggttcacgacgtccgggaacctcgccagacacaagcgcctgcacggctacatcgaaccgctcaagtgccccgtggagggctgcatctgcagcttcccgagcgacctcaagctccagaagcacatgaagttccactacggcgggcctgtgcacttgtgcgaggtgcccggctgcggcaagaccttcaccaccacgggcaacctcaaccgccacatgaagaaccagcacttcgacgttgcgccggcgctgcgtacgccgcgcagcagcgtcacgctgggcgcctggagccccacgacggccgatgcatggcggccggagacgcagctcgcggccccgcagtgccgactcaagcgcgcgtggtcaacgggcacgaacccgctgccgcaggagtcggcggcgaactttaaccgcaaaatcgaggatcacctcgccgcactggacgaaacgctggacaacctgtcggcgctgctgatcgacacggggctcgacggcccaaagtgcggcggcgacaggcagagctgcctcgtggacgacatcatccgcttccacgtgcaggagcttggctacccttagaactcgtagactcaagagaaacccaacacgtcgcacataggaattacttaaaagaagtcaacaagaatgatatgcgtcgaacataccagtattggaagctgataatgcatcccaaatatgtgcccaaatcgccccaaatgtcccaaataatgaattgtctctgtaacatttaggtacatatttggggccaagtatatgactgctttctcgtaaaactatcccaaatatgtaccaaaacggagttgactgattatggtctatagtctatgggcgagggcgagtggacgcgagcgcgagcctcactcgatgtattcactaatcgccaacacccgccgattaggcgggggtgtgtctgtgcgagcgagcgaacgcgagcgctgcaacccgatattattttttctagacaccgcgcctggccgagacgaggaacttagcgtaagggggggcaggccgcgcagcggcgccccccgagcgaagcgagagaggggcgggccccccgcagacccgtcgctaagtccgcagacgagagccaacgcgcgagtgtccgccctgtgctgctctttcatactgaaggttattctgtcctaaatatgtaccaaaacgttcccatggtcttaaatcatttgggaaaaactttgggatttggggcgttttcggggtgcattatccaataccccagtattaacccctccaaaccgggaaaaaagtcattcttatactgcatatgcagtttgattagacttggcatttgtatacaatgggctaggcgagcgcgaggggaattatgctgagatgagagtttggtgagtgagcggtgctaaaactgccttatcctgcattcttattttcaaagatgactctttatgctgcataacaacagcattatcacgaaagggacgaggcaaccctcgaacagaacctgagcacaccccgcttgggtgcagcacggtttctctaaaattcggaaaatgaaacttcccatacaaagatgcatatacaaaggtgggggggtcgcctctacaacgtaacgcaatcacttgattgccagctacttgttgtttgcaccatacaaaatctgagtgagctagatatcatatatttcactggtaagcatacattttgaaacggttgttaaacggactgcttgggatgtgaccgagcgcagacaaggtaggcaggatgcaaaacgagatgagcacgggagtagacaggtacaatataaaaagcgaattgtacacacgattacgcttatgcaaacgattggtgatgccaacagacttatcctgcacatattcagcataacgacacgataatatgcagcttaacttctactggcttgtccggcgtctcttgtgcgatgctgaagttgcaggcgttcccggtgttgatggcgcagcctcagagtcttcgtcggccttgacacggatccgaatcactttaccattgtccatggggaccagcttgccgttcatccattctttatgccagatatcccagcacgtcattgctacatctcggactttgcggcgcgctcgcatacacaggtaaatcgggcctgtgctgttgcagtcgctgcagaagtaggtagtcgtggaagcgcgctgggcgccggagcgaaggatggagcagaccttgcaggtccgctggcgacgttttgcctgagagccttggtttctccactcatcactttgacgcgcagtatgcttggtagatgcctgggtgctgctggtcgatagggtagtataggccggttgggtggcttggcgccgcgttccaaaagtattcccttcatacatgtccgatgcttgcagctggcatagctgcaagtgcagcaacttcatgtactggacgtgagtaagcggccgtgactccttgttcttgtgaaacgccttatgcacaatgtacccattcacgatagccaggtctatcaatcccagcaccaacgacttgtagtacttgcgaaatcgtagagcgcgttgtagagaatatcgttgcagtcgcagctggtcatggacgtccacgccacccatgaaggcgtggtagtccttgatcaccctcgggcacgggacctcgactttctcagaccgatcttgcctcacgacgcgatcaatctcgacgctgccaccagtacacagaaagtgtacggggcgcgaatcccaccagcttattgccgtcatgttcggcaccatacgagatctggccactttgaaggatcctcgagcaatggagtcgggcctgctcttcttcttctcaatcacttgtttgcaatacccaagtcgattcgtcatgattgtcccaacgcaataaaaacccatcagcagtagctggatcgcgagcgcaactgaagtatagaagcgctcaaccaccacgagccgcattccttgcttcctggcataccgaccaaacacttccagcaagttccgcacgacggcggcgggaccggacttcatatccggcttgtgtgcatcacttgcgtgctgctttttgccgcaatagacctcaaacctgtcgatatgcagcataagtaaaacagaagtagtcagcctaaactgcataatacagtatagtgagttgaatcgaccaaaaaaaagcttaccgaatgcagtacgcaatgacagcactgcagagcatgaaagcttcgcgccccacttgtgaggcttatccttcatgtagacacgcatcttgttgaaacttgagcgacttggtagcacagcctcatcaaaggcaaggtgggaaggcgcaatatacccacgtgcaaaggtcctttgaagcacttcaaccactttgcggatcttccaagcgcgatccgtgttagcgcgtggatctttgttggaattgaagtagaggtttcgagagatctccatgaagcggtcgcgagagagcacagtgccaaagcacccgcgcgaaatggcaccttcgtcagcggttttccagtggttggaaagctttccgcgattgggcgcaatcgtcctcgccaccaacaagcctatgaactgacacaactcgtgaggtaaaataggcttcattccttccaaatcgtgctgaatgtcgcgtcgtgtcttcttcggtaggtctgaattgaggtgctgcttccgtcggtaccgccgatacgtttcgtcgatgcgctgtggaagcatctcccgatgatactcgttggagcaagcagcaatgtgatgctacagcaccactggcaggaaatagaagaatagcgccacgggggggtcatctcgccgaagcgcatccgctgttggccccgagtagccttggcgcaaagctgggtagctagacgcgttgtcgatgggctcgtagggagccaacaagtgcttgtggatgtcgggctcgacgacgtcttcccaacctgtggcagtcatgttgcgcaggacagcgttctccaggtttccggcgagaacctcgtcttcgcctccaattgactcgaggaaattttcagcgaaaagcacctctgcagccacctcctcttcagtctcatcaggatcgtcgtgaacatcttcaggtgcgcactgctccgcaccgtcgtccgagccgtgctcaccagtctccacgtcatctctctcagcctcatccccggattccatggctccgaatgatgcaccgtcagctgcatccacggtgttcaagttgtcgtcaatgttgtcggccagcaactcgtcgcccggtgtgctttcgtgagtgactgcaccatctacagtgaataacacagcatgttagtattcagcaatacagtcaggatagtatgcagaatacgatacaccatggcatgcagtataaaaagctgcataatattccgtttaaaatgcagcatatcagtcagcataagatgcaacataccgtcactcgagtcgtttgaggaatccacggcttcttgtgcactcgcagcactcgagattgggtcatcatcacttgatccaccttggtcgacatgcggtgaggtcgcgatcaatactcgcgaaggtcgacggttgccacgacttggcgtcgacggtgtcgatggtggctccagcgaccgtcggaccgagcggcttgcctgctgctttccgtggccgcgagatacaggagcgggatacgtctccttgctggagctgggcggtggaggaggtaccggacgcgaagttgatgctggaggcgtctccacgtcagcgctgggacgccgagcaggtagcggacttggtgtaggctgtggcactgagctcgaagagggcagtgagccagtagcagctcggactcgcgcttgttcgcgcactcgggcttctgtagcttcgatttcagcgccgtaggtttctctgacaacgtgagcagcagctgccaactgggcgtcgccaggagcaagttgcgtcgacggcaaggaggcagacgtcgtggcggggacacgcgcacgactccgaagaactagaaggaaaagcagcaaatttgtgtcagttctgtataaatacaaaccattcaatataaacccaccgttcgcataatactccagcactccctcctcgcccataaagtagtcgacgcccgacgccccgcttgtactgccgccgggtctgatgtagaagtagcgatcgtccagacttcgtcgtggcggcgccttctgcgtccagtcttgagctttgagctctcgccagacggacctgaacgatagatcacgcgctgtgacctcgcagtcgcgcaggatctttccacacggtttcaccatcgccttgacttgacttgcttcctccggccgcaaattctcgaatgaggctgaattcacaaaggcggcgtggtccagccaatgtaggaacgtgcctggaacgtgccgcaaccctccaaagatagttgtagatcagttgcagttttcaagaactgcaaattcctatatctcgaatttagacaaatgagtggcatttcgtatgtaagaaaaagaaaggcgcaaacagaaacaatgcaaacttttatcttaaagtttgtatacctcttgtcatggaaaaatacaaatcatacaaaaatcaagtcattttttccttaaactgcatatatgcagtttaagggttcaaatctaagctgcattatgcagcacccggtttggaggggttaatgcatacacaacgctttctactgtattagcatggatcttgccgtagacttcgccatctattcgaactgttgcttgcatttattatagacgacactacgctaagggcagacgcccgcgcgatgcaactacagagcgctagatttcttgttcggtatcgagttgatctcgtgctctcggtctccttcattccgccctcggccctgcggcaaagcccgcggtggatcttagtccttggatctcagaggctcgtccttttcgccgcgcgtcggaccatgacaccatccgcgcggatttcgttgcctcgaagcgtgtccacgggcttcacactttacataagcataagctccaggcccggagatcgagctcttgcgactcgactcggctggtaccgtgcgaagtaacggcaactcggcgtcaagcgaggcaaaagtggacatggaagccctgccctggcttggctcaggcggagacagcagcgcgccgatatctcaggctggcgaggtgctcgcttgtggctcttcctctacgaacagtgagcgctgtcacacgccgttcggctagccgaactccagacgtcagtgtggcgttccgactcgatttgtggggtacagtaacggctagggagtcagatttgtcttggtttcactatgcctcgacataaaaagccgcgcgtggtttcgatggacagctccgacgatcgacagtggcttggtccgccccggccgctgggcggatcgcgccgtcctcagcagctcactttcacatttgccttccaccacacaacagcatgagcaccatgagccccatcactaccgagtttcaggccaacatgagccccgagctccggcgccaacacagtgagtcgggcgtctaccgctgctccgaggccggatgccaccgcgagttcaaccgcaagtacacgctcgccgagcacgtcaagacccacacggacgagcgtccgcacatttgccccgtgcccacctgcgccaagcgcttcagtacctcgggcaacctctcgcgccacaagcgcctgcatggctacatcgagccgctcaagtgccccgtgcaaggttgcatctgcaccttcccgagcaacaacaagctggagaagcacatgaagtttcacaacggcggcgcggtcaaggtgtgtctggtgccgggctgcggcaagaccttcagcacgacgggcaacctgaaccgccacctgaaacaccagcacccggacctgccggtaggtgaattccaggctcagcagaatccgacggtcgtggtaccccaggtggtcgtcaccgcgccccaagtgatgccgccgcagttcctacaccgcagccccacgagcgccgagcaatggaccgcgatgggaccgacggtgcccgtgttcaagccacgcatggcgacttgctggccgcagcagatcatggcccagcagcagcagccgatgctgccgccgtacgggcagcaagggccacaggccatctactcgcccacacgctcgtgctcggagctgttcgaggacgtgtggaactccgagatgctcgacactctcgtgagcgcgctgcacgaccccaccgtgcgttgttagtatttaggaggcgcagccatccaccagccagtgtacctacgaaaggtgcttcggtgttgtccggtaacttagtaaatatacgtcgacgtgagcgagtatggtatccaagggtgtccacgttgctcaccggcatctgttccacactagcgaaatgtacccacacctcggtgtcagctagcatgctcacaccgcccttgggccgtatcatgccgtatcaggtgtatgcattgatgcggaattcgcagctcgaggtggagtttgaggtatagttgctgcgtaccatactcgtgcgtccgatagcccatagcctgcgcaagtttgtcaggcatgcaggagtcctgcggccgaatgatgtgccagtcctcgggcttccctgaggtaggaagcgaaggaactgtaaccattgacggtgtgcgcgcgcccgtgtaagttgcttgatcgtctgactcctatgtggaatcagaaactcggtatgcgctttttgccgagtatgcgtctttagcagaaaaactcgtccagtacgcgccttttgcagttttctcagcacaaaggcaacatgttgaacttggccgcggacctgcaagggtccgcgtcttctgtacgcatgcgcaagagcttttgtaatgctgttaccccgctgctacagtacctctcacaattagaagtggtggtggatgcacttgggctcgagccgtgccttgtcccaagcatacctcggcccggtacaaggcaaccctgtcacaaaacctttgaatgtgcacacgtctcaccaggtcgggctgcaccaggtgcagtgcacctgcaactgatgccgtcggctagcatacatatactcgcggcagcaaacaccttgagctattgcggtatactcgcagaacatttcggatagctgtggtttgctactgaatgctggtgtcatgaaatacatgtatttcgaagtaaatcgtctacagagcagggcactgacgctctgttcgagtactcgcgttggttctccatttaccgtaatttagatctcatactacagacagatctcttacttcataccaggcattagccaatgatatcgcgccatttacccagctcatcagttgagttctcataatacgtagggtataaatagagcaaatgcagcaaaagagggccagtcattgcaagagaacaaccatggagcgcacgccaagtccgcggaaagtgatgtcccgctctccaggtcagcagggagggcggacacgcacaacaggaacaggaaagctgccgaagcagtttaagcgtgttactgtctcctttcaacacaagctcagcgtgatcgagttctacgacgcagtcgttactaaggagaaaatgcgcgacacagtcaactacttctacccttcgctcacggcagcccaagtaaaagccaaaaagcgacaggaagcgtggaactctctgcccagctccgtaatagtcagcggatttcagaaagccaagctcgttccgaaagacgtgacgacaacactcgcgagcagtgaggagcagcggttgctccatatcgagccggactgggagctgctttccagactcctcgatgaagtccccgtgatacgtcacgtcgtggatccgaacagagatatcgatacgctagctgccgtggagtagatagatctagacagcagtgtttaagggtaccggtaaataccactttgcatgatgcacttcagaatacgaacataaaatcgtcggtacatgtacatctcgtgtccactttgcaacacgacaacttcaataatcagctatatgtagtatgaaatctaaattacggtagttgtcactcgaggttttgtctacacatggggaaaacgtcaaaaggtgtgtgaatttgaaacgttttgtcagaagcggttacctcgtgtcattaggtgtatgctaggttgtcggtatgacagtatgtgtatgtggttccaagcgcactaaggtgcatcataaagctgcatcagcaacgaatgcggtgactggcgtgtgggcttagatccaaacccataaaacccggggttaggaaggcttctacctgatgcaactagcagcgaacacggtcaactaataatagcatatagagcaactgtagttgtcgagtacagttgcatatagagcaactgtactcgacaacttcgctattgtggctacaaggaactaccaacgcaaaccgcaagcgtctatagcatggctgtactaggtaggttttgcatctgaatttcggaggtgaacgagctctagtgagagcccccaaccgggggagagtgtaggtattgtagaactgtggcaacgctgaggcctggctacaatggataacgacgttcattgtagtccctcagtcgtacaattcgctatcaaagtcatgggcaccacgaaccggacgagcgtgtcgttaataaactactgtgcttggaagctcgatcctgggtctgtatgacccgacctcggccgaaataccgcggcaaccaaaacgtgtgtcagtacgcgacgtgacgcccacgaccactacacctattgacaaacgttttccaaacgcatacaccttttgacgttttcccctacacatgtgaccacggcttctctctctctacgggattcctgtagccaagtctaagcgacaaattgttatccaaggtggcgtcagcgtgaatatgtgactggaacagtcggtcttccttgggcccagaagacatgacctggaatccagtcccctagtccaaatcttctcaacgagaacctcagagctacagaacaccataggctcgcacgcggccctaggtttcggtctctttgtcattgctgcattgcagctgtgcgattaaagtcaacctcagctgttgcgcagctaaagctgtaacgcgcagcaattatttgcttactccgtagctttggtcgcagtaatagcctcctccatcgaggctgcttcctggcaaggcgttgatgtcttatgtgttcgttgtgtactgtagccgcgcggtgcggtgcatgctgtggtacatgcaggttatcaagacatcgatcagttctggtggtggttgtcaaagtgttgattcgggataaattactgtacactatctgctaagtcgtttacacgctcgcttagtcgaggagcattcgcgacaggatgtcgagcatctcgggcgtccacggcatggtgcacgcggtctcgaagggctccggcagctcgacgtcgctctcgtcggaggcgaggtcccaggcgttgttgctccactcctggtcgatgcccgtggggctctcgcgcgagggggtcgagcacttctggccggtgggggtgctgcacatggagctcagcgtgggcgatgctggggcgggcgccttgtacttcttgcgctcctgctccgagtgctggttcttgaggtggcggttcaggttgcccgtggtgctgaacgacttgccgcactcaggcacgcggcacgtgtgtgtccggggcacgtagtgcgagcgcatgtgcttggccagcttgatgtcgctcatgaacttgcacgtgcagccactcacggggcagtgcacgggctcgatggcgccgtggaggcgcatgtggcgcgagaggttgcccgacgtgctgaagcgcttgccgcagccccgcgcgcggcacacgtgcggacgctcgcccgtgtgggtcttcatgtgctccgtgagcgtgtacttgcggttgaagcggcgtccgcagcggacgtcggggcactggaaggccctgctgccgttgctgctgctgctgttctgcttgggggtcgtgtccgtcgggatcacgatgcgatcgagctggagggcctgcatgtttgagctgttgtggtgtagccgggtggtggtagtagctgaagctatggcgctcgctgactgttgttgttgctagtgttgggcaagttggggaatgagaccgacgaagcaagctgttcgaaagcgccgatgctgacgctgcagttggtgcggtactgtccccccgaacccagcccggagacgcgcgcaatcgaccggcctttcgctgtacgctggacaagcgcagcgtgatggatgtcttacgcgattcagcctccgcgatttgcctgctcgtcagtggcggctatgcgagcgaaagctgcctcaggtcatcagcccatacagttgtcgagtctcctttgcctccgtccctgctcccccagctggccatctgccgcgcgcaaaattgctcgggctgctcacacaacattcatgacccgcctcgtgtgaccggcacatcgcacgccgcgagcacgggctaccgactcgaccgcggatttcatggcgcggggatccgcgtgcaccgactgtgcccgtcacagcgttagaaaatccaagcagagttcaactcgatcggctaatgaaaacaccaacgcttacgaatgcgctcgcatggtccatggcccagtggcgagtgcatggtgctgcacagcatgtccactggggcgcgcgcaaaccaccaggcgatacaggaaagcgtggcgtgtccgctgccgctccgcgcatgccccgtgagtctgcgtttcctgtaagacgagggtggcggatgcacttcaccgtcgaagctgggctagcgctagctcgctgcttgcttactgcagagcaagctgtctccagcaacacattgcggtagtcggcggcgtgctcccttttctctttcgggatgctctcagccagtgttcgaacagcaaaacggcacatttggctgcctttttcgttgttagctctcgatcgcgcaacctccaagtattgtatgaccgcacacttattcatttacatacgctaagacttcgcaattcgacttcgtttactcttacgcactccatgactcaactcagcaacatgtgccccagaatttcaagcgtctcggggctccagggctcgtcacacggcctgtcaatcggggcaggggtcacgtccatcataacatcagcgctcacacctgccgagtaatcctgctccactcccgtggggctcaacctccgagggacgccccaactcgcgagcgacgagcgcgcgagctgctcgcgcttggcgcccgtcaagtgcttcttgagatgccggttcaagttgcctgtggtggtgaatactttgttgcatcccgccactttgcaggggtgcgttcgcggcgcgtcgtgctgcttcaggtgcttggctagctgcacgtcgctcaagaaggagcgcgagcagccgtcgcgcggacacttaatcagcggcagcgggccgtgcagacgcatatgccgcgcgaggttgcttgacgtggcgaatctcctaccacactcgggggctcgacagacgtgaggtttgtcccctgtgtgcgtcttcatgtgctcggtgagcgtgtacttgcgattgaacccgcggccgcactgctcaacggggcaatagaatcgccggtcgtcctcacttggccacatggtggtgccgcctgccttgtcgagggttctggtaagtcggagaatgaagcactggtgtacgtaccgctgctcagctcaatgtccacaagatactttcactgatcgtcagcgacattgcagcgcaatcgcccggcgggcactgagtggattgcgggcagcagcttcaaccgtgtgaagggtggtatggctacgctttcgttgctgtcatacgcagcaagcctcgcacctgaattgatgtgccggggcaaaccaagggggtgacctgacgcgggaatcccgccagcagagaccatggtccgttagacagcaacgtgcgcgcgggccgctggattgccccctgtgcacgagacggtcttgccgcgcgacacacctgcggggtatcataaacagattcgtgtgatgatgcccccaagtggacgcaaatggtccattggtgacacaaatggtccaactttgacacgcgtgggatttgatgacatcagctcaacaacctttatgaacgaatatgcgtatcaattctggaaatgctgtagccatttcgaggggaaacagcgggcagagcgccgcaaccaagccgccgcacagcgagcaattccttggttcgacgacctccgaggtcatgcgtgtcagttcgaacagcaaaacacagcagcaaatgattgcttcgcgtagtttgcgcgctttgcagtcgcttccggcgtgtctgtctgcccgtcgaaacgcagcttgattttgctggggcgagcaacagccagtgggcggcacttttatctcttcgtgcgcgtcgcgcaaacgaaaaaagtcgtcgccagaggaatttccactgtacagtacagtggagaccgagggcagcagtggagcaaggtattatatcatcggcacaccggtgattggtgattggtagggcgaagttgaagtgctatagtgcagaccaaattagacggacgcagggctatgattaggctaccaagaccacgtttacagccgcggatcagcagaacgctgggcatttgctcaacgcttgttctccctgctgcttgctgcctggcgagcatcaacaaccatgagccagtcgcccctgcggtcgggcttggaggtgcgaagtcgtcccttgcagtgggtatctactccattgcgatctaattccaagcggttctcttttgatgctgtagcgttcgggccccgatgcagcaggtatggtgtcgtccatgacccagaaaggcaccaaggagacgcgggcggccgaggcactcgccatgaaggacgagcagatgaagatcctcggcagccaaaacacgcagctgctgacgtcgctcaatgcaatggacgacgagatcggcacgctgaagatgcacatgctccgactcgaagaggagaaccgcagccttcgagaccaaaacttcgagctgcagagcaaagcgcgcgccgccgaaaccacgctcatcaaagctcaggtccgtcgcgcgcctgagttgtatgggtattgatgaccttttgctgatgcatctcgctgttctctagactggcatcgaggagcgcgagactcaagtgcgtgttctgacagaccacaacactgagcttctgcgtctgctcgagcatgaagaagcgcagagcgcgtcgctagctacgcggacggcagcgttgaagtcggatcttgaggcattggagactcgatatgcttcgctcttggcatctgcgaagactcacgaagaaatagctactcgtgccacacgcgagggtcagatgcgagctgaagaagtgcgtctactacggaacgagagcgatcaactgcgtgcatgcaacgttgagctgaagatgaagacacaagtagagcttgaggccctgcaggaacagctccgtgtccgcaaggagaagcagtaccagctccttgagaagctccagcagctcgaggaagccaaacgacagagcgacgaccagctcgcgtcagctgaagagaaggcgcggaagctccacgctcgcaaccaggagcttgaaacgcaggtgcagcttgaagccaaggccaaacgcgctcagagtgatgccaacaagaacttcttcatcgagaacggcaatctccagcgagacaagcaagagctgcagacgcgcttcgacaaggctgaacaggagcgctcacgtatggaggcggagaaccgagactctgccgaccagctccgtgagatggctgaaaaggtctttcagctgctggagcgactcaaactggccgagctgggcaagaccaaagcgatcgacggtctcaaacagaaggagctggagctgcttgcactcaagaagaagaacgctcgactgctgaaggaggggacccaggagggcaaagctcgcgtcaagtccgaattggacaagaaggtgttgctggagcagctccaggcactcaagaagcacaacgcacagctatccttgcgatgcagtgacgaagtaaaggcgaagctcaaagaggccgacgagcgcaaacagctcgaggagaagatcaaaaccatgagctctcgtgttgccttcctgctcaacaagatgcaagccgacgaggaggccaagatcgtgagcaaggaagaaacgaaaaaactccaggcgcagctcacgaccttgcaggagaaaggggccgagctcgctcataaactccacgcgacagctgagagcaaccgcgtcgtgactgaagctctccgttgtaagcaggacgaactcgacgcacaagcgatcaagttcgaggctactcagaagaaaatggccgagatggctctagccatggagcagtctggggtgccgatgacgatgggcattgatggggacaaccagcaggaaggtcaccaacgtgggaaccaagagcccacccaccccgaggacgcagccgcagcggctaatggccgattctttgtcgagtgccgcgcttcacatggtgggttgctgcttatcaaggccaagcgaacaaacttcacgccaaaggcccagcagcaatccatcgacttccttgagcgagtgggtatcaacgccttcctcaagcgcgcgcagaagagcatgaacaccaaacagctcctagtagagcgtatcgcagcactgctaaccactatcttgaccagcgaagacgtggtagccgacgtgaaggagcagctagtagccaaagaagaccaaatcgcgcacctttcgcgcaaaacccgctggatgcaagagcggctcaccacggaggaagacgccaaacgcaagacactgctgcgctacgtgcacgaggtcaagtcgcgcgcactgatcaccacctccgactctggcgacgatcgtaattcggcttcatccgggatcctcaaacttccagaaagcggtgtcggtgacgaggaggtgcacgccatcgcggcacttctccgcaacgcgaccaatgtccgtgagcttcagctacgaggcaactcgatctccagtgaaggcgcgcgtgctattgcagctgtgctctgtatttcgacgtgtcggctgcgtcaagtggatctgaggaacaaccagatcggcaaagacggcatcaaagtgctggctgaagcactcgagcggaacgaccgcatcaagcatgtgtacgtccacgccgggggtaaaattgaggcgctcggcaccacttctccagcttcccaagcagccattgtgaacgctcagatctcgagtgccgcagcacttggaagctcgggatcgacgcatgcatctctcatcggtgttgaaacagtgtgcgtcgtggacgtgagagagcagacggaggcagacaccagcagtgccagcacaagcctcctgatagactttgctgacgacgcgcgtgttactggagtgtcggcacagccatcaacgggggctggaccgaacagcgcattaaagctgaagttgtcgggaatcggcggagatggcggcatgaagtcgtccgccgcgaacgatcgggacagcagcaaccggttgttctcgcgtcgtcctttgtcagctacagcattgaagcggcagcgcgaacgacttgctcttgagcgtaaaaaacgccaggaagaggcgaagcgccaggcacgcaaagaagccgagtgggcaggtcgcgccggtgggatggagtccagtccgtcgcattcctccaacagcaagaagctgccaccgatttcgagcacgagcagcggcgcacagtcgaagggggtaacacgaattagctcggcacctgtactacacaagaataaagatggcagtagtggcgctcaggcagcaggcgatccagccgaaagctgacagcatcatgtcattttagtccttccgttgtcgttgtcctcacaaatcagcagccacgtaggcgtatgtattcctcctcaatgttatccatgaacacccacgtaccgactggaaggcaccatgatgattgacttggtagctatacagtaaagtctgtcgttgcttccctctcgcgctctctgtcgcgagctttcatcagcagacgctgcagaatcaacaaattggcacgccccgttcgcctctctgacagtgtcaacaaattatcgctgtcctgcgacataaagtgcagtaaccgcgatacgctcgagttggcctcggtcacagtaagcatcggtaggtcatcgctcttgatactttccagcaccaacgctctctgtgtgtcacgaagtagcccttgtgctgctaaactttcgatgacaatctcgttatcttttgcgacctcatccgttccattcgcctcggacttgtcgaaatccacgaggtcgatcataaactgactaggattgtcggtgaagtcaaggccgagagtcttctgaagtgctggtacttttgtcagtcgctcgagcagctctgtgtacgccttgagttcttcttctttatcaattgcttcaccgtcgccaggcagcgctgcagccaggaacaaacacgccgaccaagcttgtcgaatcaaagacggaggcacagattcccacgccttctgtaaccagcccatcgcgttccgcaaatgagtgtgcgcgtggacgtcaaagacttcgttcaccggagatccgtcactcgccgttgtcccgttgctctgcccctcggctttattcgtctccgcccactgctcatattcgtgaagcaaagtctgaagcatttcgcgccggaactgcgacttgaaccatctgacgacaccttggtgaaatggctgggaatcgcccaagggaccaggaggcaagaagagaagtacgatggagtcgaagctaaaaccatttcggaacgaccccgacggattcaacgcatgagcggcagcaacgtgggccgtacagctgtccaagaccagataccacacctctttcctcacggtcgcctcgtgattcatggcctggatgaagtctgcaatcgtatttgcgtcctgcgaggcgcgacaatgatcgcgatagtgaattccatacgtcgaaagcgtgtccacatcctttaacgattccgggttcgggtctttgccaaccacttgcaagtgcagtttctcccccgtagcactcaccgccatcaggactgaaatccgctcgagactacgcacatccatgttaacgactgagtccagtctcgccgacgtcgtgcgatggcgcagcgcgagttcgtccagattccaaatgcagctcggcgacaccgtcagcagcaggtcgcgtatcttttgaacgcgctggtcgttcgtcattctgtccgtcatcaatgacgcgactcccgcctggccgtgctgcttgggcagcgagcgcatgctgcgccgctgcatgtaccgatgcagccatccgttcgacgccttgaagtccgtgagcgacatgacaacttcgtccgacagctcgctgctgtagtctgccaggatcttgttccggaactccatggccttggactgcaaaagatctcccgtgatcttgagcgccggcgcgtcgagctcgatctgcatctgccacttgtacagcatgtcctcgatcacgctcagcttgtgctggtactgcagcacctttcgactgctcgtggcgctctccacgagcgcttgggccgagatagccgcgcgctccttcaccatcttggtcacagccgtgcgcgacacgccgaacttctccgccgccgcgccctgcgagcctccctggtccacgaaggccaggatctccatcttctccaggttggtcttgcggacgcgccggcctttcttgggcttgggcggcggcgcctgcgtctgagtctgcactggaggttggacctgttcctgcacctgcggcggctccacagcagctgccgccactgcagcgttgagacccgccgcctcctccgaagtgatcaccatgtccacaggctgcgcggcatctccgagcacggcggaagctgcagccgcctcttgcactgcatctgccggttccaataccggcacttcctgcgcgtctttgggatcagatgctgcagccagcgcctctgattccgcctcgtcgtcgctcttccggcgcttggggtcgtctttgcccttgcgcgctcgcgctttcttgctgtctgcggcggccagcgcgtcgtcctgcgcgcgtttgcccagagaagacggagatgcagtggatgctggttgcgattgctcaagtggctcgctctccgtgtccgacgagggcgcagcgtgtgcgttgcgcgccatgatgtttgagctcgaccttggtgttgagctcgaaaaatgcaaaatttgtgaaacgctatgaaaaacctcgcatacctactgaaactctacgatcagttacgtaaaaatgactggtgagggggagaacttagtgacatctctctacaagaacgacaagcttggattggcagatatgtacagtaatgtttcattggtggaaaagcatggtgcagtctttcggagacgtactgtaactggtgatctcctccacacgtcaagtcggaccaaagatgtggcgctgcggagctggtcggcgacgtgccttccgcggcgtcgctagcgctgcgcaggcgtcaaatgccggctctacagctggcacgtcgttctccagtgctcgtgccgcggtttcgtgcaactccgggctgcaggtgacgcgcgcagcggccgcaactgcgcgctgttcctctcgcgcggctgcatcgctgctgtcgtcggcttctagacctattaaccgcggttttagcagtaattccaagaggtcattgctattgcaacgccagaatggtccttttgtgggcgccagactgtccgccttggacctgcgcagcttcagcagcgtcgagagcatctatcagaagaagacgccgctggagcacgtgctgctgcgtccgggcatgtacattggctcggtggaggccacgaaggacacgatgtggatggtgccgtcggacagcgcagccaaggaggacggaggcgagctcaggatgaagcagcaggccgttgagtacgttcctgcgctgtacaagatcttcgacgagatcatcgtcaatgcagtggacaacaaggtgcgcgacccgagcatgcggcacttggacgtggtcattgagcctggcaacaaggccaatggatacaggccgtggatctcggtgtacaacgacggcaaaggtatccccgtcaagttccacaagaccgagaaggtgtacgtgcccgagttggtattgggacacttgctcacgggatccaatttcgacgatacggctgcgagattgaccggtggaagacacggatatggcgccaagctgacgaatatcttcagtaccgagtttgtggtcgagacgggggatacttccactggtttgcggtacaaacaggtctggcacgacaatatgcgcacgcgtggagaaccggagatcaccgagttcactggaaaagaggccaaagatttcacgaaagtttcgttctcgcctgacctggagagatttgagatggagaagctgaccgcgagcatggcccgtgtgctgaagaagcgcgtgtacgatgtagcgggatgtttgtcggatgtggaagttactctgaacggtaagaaggtgccgatttctgggtttgagtcgtatatcaaggctttctgtcattccactacgacgtctcctgcttcgaaggcgacaaagtcaaacgcagcatcgaaagacagcgacagcaaggcttcttctggcgcggactacatgtattcccgggtgaataagcggtgggaaattggtgtgttgccgtccgatgtgggttttgtccaggtgagtttcgtgaatggcatgtcggctctgcgtggtggctcccacgttggttacgtgagcgaccagatctgccgccgtgttgcagagcacgtcaacaaaaagtatccggagctctcggtcagcactgcgcaggtgaagccacacatggcgatcttcatcaactgccagattgagaacccgaccttcgactcacagatgaaggagtacatgtcctcacgaccgcctacgtacggctctacgtgcgcactctccgaaaggctgctgaagctcgtgatctcagactctggtattgtggagcgcgttgtgcagagtgcgcgcgctcgtcagcgtgctgcattgctcaagaaggtgtcgtccacgcgcgctaaaagcacttcagtgaatgtgcccaagctcgaggacgccaatctcgccggtggacctcgctcaagtgaatgctcgcttatcttgaccgagggtgattcagctaaggcactagcagtggctggacttgcagttgttggacgggaccaatatggcgtgtttcctcttcgcggaaaactgttgaatgtgcgtgatgcaactgtcgcgcagctcggtaagaacgccgagttcgctcatctgtgtacgattcttggtcttcgcatggatgagcactatggcacggaggaggctcgccagaagttacgctacggacgtgtgattgccatgacggaccaggaccacgatggttcgcacattaaaggcttgctgttcaacctcttccatacgttctggcctgagctgctgaaggagggtggctttatcagcgagttcatcacccccatcatcaaggtgagtccgacctctaagcgcgtgggcactgagcgcggcctagagacccgccgcttcttcagtctgcccgagtatttcgagtggaaggctgcactcgacccggccgatctcaagtactacaccatcaagtactacaagggtctgggtacaagcacgagcgctgaaggacgcgaatacttcagcgacctggacaaccacctcgtggatttccactggagcggcgacagtgacggcgatgctttggacatggtattcagtaaagcgcgtgcggcagaccgtaaggcttggctgttaaacgaatactcgcccgactcttacctcgacacaagctcgggcgacgtgacgtaccgtgacttcgtgaaccgtgagctcatccagttctcgcacgctgataacgcgcgatcgctgccgtcggtggtcgacggactcaaaatctcacagcgcaaggtgctcttcgcctgtctgaagcgcaagctaacgagtgaggtgaaggtggcgcaacttgcaggttactgtagtgaacacacggcctaccaccacggcgaggcttcgctgcactcgacgattgtgaacatggcgcaggatttcgtgggctccaacaacctcccgctgctgtacccgtccggtcagtttggtactcgactgcagggaggcaaggacgccgctagtcctcgttacatcttcacgctgcttcagaagcacacgcgcctggtgttccctgaggaagatgacgcgctgttgcgctacgctgacgacgatggtttcccagttgagcctgtgtactacgtgcctatcatcccgatgttgctcgttaatggcgcggagggtatcggtacaggttggtcttcatccatcccttgccaccacccagtagtggtgatcgacaacctgttgaggctccttgatgcagaggaggctggagatgatcagtcgaaggtggagctggcgtccatgacgccgtggaccaagggcttcagtggagacattcgccaaacaggaaagcactcgttcgtgtctcgcggaaatgtccagcaagtgaacacctcgacactgcgcgttacggagctgccagtaggcaagtgggtggaggactacaaaaagttcctgtgggacctggtgggcaagaaggctatccggtccttctcggagcaccactcggatcgcgacgtgcgcttcgacatctcgatgacccgctcggatcttgctaagtacgcggaggacggcgcgaaggaggaagatagcggggatgccggcgacagtgaggccttggtgaaggtgctgcgccttgaagcgcctctgagcaccagcaacatgcacgcgttcaacgcagatggacagctggtcaagtacgagacgagcgaggacattctgcgcgacttctacggtatccgacgggagctgtactcgaagcgcaagcagcacctggagcagcaccaaacgaaagaggttcttcgcctgagcaaccgcatccgcttcatccaggaggtgtccttcggcgagctgcagaaggtcctcaaggaccgtatccctaaggccgagctggtgcagctgttgaaggagcacgggttctctccggcgtcggctttcaaggaggaggcgattgaccacgtcggggacctcggcttggctgccgtgggccgcgtccaggacgacgcagtcgccgaagctgacggaagcgacgactacgactacctgctgaacacgtcgctcatgagcttcaccaaggagttcactgaccgtctgcagaaggagcacgacaccaagcaggagaagctgcagcagttgcaggccacgaccccggctcaactctggcgcagcgagctggagcgcctgcgtgccgtcctggtgcgcgagaaggagttccagctgtgatatactggatcgatagatagataaggagaaatagattccatgtagacgctggtggacggaatatgtccacctttgtccttctactgcatctttcgactctgattcgtcaaaaaagagctcctcattttcctccaatgacaacgcttcaatagtccttttgaggggggaggcgagagccactttccaagcgagaactcaccgaagcaccgcaagagccaggtaagatcacgtcgattaaccgcgtgccgctaggaggtccacagccgcgcaacaccgctatacgcaccgtcttcatgtccagcagcgtctgccctctttgctgagcgtctccagacccggaaccgatctctgtaggctgagatacaggcataaatctaaccgtacttcttgttgcagcgagtcacgcgtttggagccatggctaagcacggtgcagaggtggtgatcggtgcgtcaactgacgaggctggagacggctccattcacggaggatggaggcggtaaagagactaatatcgaggtttctggttgtgtttttgttgctcttgggcagtgccgcgcaactttaagctgctggaggagctggagaacagcgagaagggccatggcgacatgagcatctcgtacggactagagcaggcagacgacattttcctcacaaactggatcggcaccatcctcggccctgctggcgtgagtcatcatttactgcaagatctgagctcttgaaggcgaattatcggctgacttactttcgtgtgtatcaattcgtgcctgtacagacgtgccacgacggccgcatctacagcctgcggatccactgcagcgaccagtacccccacatgccgcctgaggtgcacttcacgagccgcatcaacatgagctgcgtggacccccagtcgggccgcgtggacccgcgacgactggcggcgctgggcagctggcaccgcaacaacggcattgaaaacgtgttggtggccatccgcgccgagatggcttcgcccaccaaccgacgcctgccgcagccgcctgagggcaccaacttttagaagcgtgtcgctggccagaggcgagactccttgcggttgacacctgggaggagatcaggggaagagagacgatgaagggaatcaggagagagaagagagagcgctccggtcactcaagtaatgcctaatgcatgataatactgcatacttggctgatgctggaggcaagttaattgcttgacgtgtgggttggtggttgtggatgtatgagctctggttggcagcattagcttgtttgctatgtctacttctactttttgctaaatatttctaactatacgggcgaagggatcggaagcggagagtcttgggcgtggagaacacaacgggtggggcctctttctgaggttcctcctcgtcagagaagcattcttcctcttcgtactcgtacacattttcatggtaggtctgcgcgcgttgttggagttgtcgccatcgagttgtcacttgtacaatcgggtatctgaccatgtgtaggatggtggcaacagcgcgcaagaagtcgacacccgaagccaccgtgaagagcggcacgagcagataacccacagccttccatacaggcgacgggtgatcgctgaacgggagcagcagcagcaggtgaagcaacagctcgcgaccaatgccacaggcacaaatgatccctcgagagcggtgaccccatcgagcgaactgcttgaacagcggatgccagtcgcgtcttgcctccagaaaccgcacatgcaccgcggcagcgttcacacagccaatgcccaagtcaaaggtgagcatatactggaacgacgagcccagcgccgggtacagcctctgcagcgacaaatacagcaccaccaccgccacgcgatccagtacaacggacgtgaagctggcaatagtaacaagcagtccactcttgatgaacagcataagtctccgcgagacgacgtcgcacgccagcatcatgagcagcaacgtcgtcaccttggttcgcagctgtggacccagtccgctcttggacaccggttggaacgtgcacatcatgatgtagatcagcactgcgcggaacgattcaatcagcggcaccaagaagaccgccagaaagtgttcgaacagcgacttgtccgacaccacgccccagtatctcgagaacacgtaaacctcgcgctcatttggagccggcgacgtgattttcccgctctcgggacttggtcgcgacgtgcgtgtctcgaactcaggcggagacagacacccgacgcagaaccgagtgtcaatctcgctgcggacggtcctggagtgccccgacttgcagtgcagcacgcggaactctttcctgccgtctgcagcgacgcgcagggacgccacttcaaccatcaacgggtccagtagcagcacttcattggcgctggctttagatgagaagaagggctcgtggcgcagcgagccgtccgccttggtccagaagaggtagggctgcagcaggttgtcctcgtccagcttgaggcctccgggcgcgcaccagaccgtcacttcgtcgcctggcagcagcgtgtacctggtcgggaagcggaagacgtcgcgcgtgccgctgcagctgagtcggaagcccgtgaggtccacgcactcctcggacgggttggacaccacgacccactgcttggccgcgtcggcgcgcgagatgtagagctgctgcatgacgatcctgtggcagatctgcatgcccgcgcgcgctacctgccggtccagcggccccagcggtagccgccgctgcagcgcgtagctcatggcagcagcaggatgaccacttgagcactgagccagtcactgactgaagctatgttatgttattgcgcgcggtctttctgaacttttggatgattcccgccaaaaataccatggtgtggcgaacatatatggactataatatggtctattatatgggttttggtagttatttggtgtgcctacccgatttgacttcacatacgcaatcaagcagctagggacaatcatcttgcacggacacaccactggtccccacaatcgaaaagctaagctaccgctgcggccaggatggagaccttggacatggaggacggcacggagggactgctcacggacgtgggcttcatgttcgacgcgtgtctggagaaggtcacgtgccgctacgagtacggcgccaacaacgacgtgtcggtgctgctcacgtacgccaaggaggagcccggcgcgctgcagtccggccactacgtgtggcccgcggcgcccgcgctctgcgagtacctggccgcgcaccgcgacgccatcccgagcggcaacgtggtggagctgggcgccggctgcgggctcacgggtctggccgtggcccagctgcggcccgacgccaccgtcatcttcacggaccacgacccgggcgtgctcaaggtcatcgagcacaacaccggccagcaggagcgcgcgcaggccacgtgcctcacgcagagtctgcgctggggacccgacggtgccaaggagatcgaggcgctcgagaggttgcagaccggcccggcgggcagcaagcacgccacagagctgatcgtcggctcggacgtcatctacgcgcgcgaggtggtgccgctgctcttctggactgtggacaggttgctgtcgcccagcggcgtgttcctcatgtgctcgagcttcggctatgacaaggacacagagcgggagatcgacgagcagagcgccaagtgcgggctcaagagggagatcatccagtgctcgctcagccaggggggcacgaggatccagtgcttcacgcggacagcaaccaggtagacagacggctgctgctgggtgtgtatggaggtgtcgactggactgtcctgacctgctgccgatgctgtatgtgacgcgctgccagataagagaggaagcggctcgctgccggcgctagatggagaagatcgcattgccgggaggatgcacccgggacagacagagctcgcccaaaaatcgacgtacgcttctttctattaacttcccatgactctctctatcttgcttactccgcagcggcgaacgcgtagagcttgtgctcgacgatatagttcagcaccgccggatccaggtgctgctccagctcagtgcgatctgcggtcgcgcgcaccttcgtggacgacacgtcactgagctcgggcacgtgcaggtacttgaccctctcctgctcctgctcctgttcctgcttgtctcgccacggcgactcgacgcccttgcgatccaccaccagcagcttgaccagttgcatgagctcatccccgcgcttccacttgccagccaatagatccgcgtacgtgtcgccgcccagcagcatcgtgaagctcgtgtcccggtacttgtcccgcaggtagagcaccaggtcgatgctgccgagccggagctgctctgcattgtcgctagctgcagccgcgcgctcgaacatctcgcgctcctcctgcaccaccctcagcgctgcgccggcgtcgtctgctcgctggagcgactccagcaccaagcgacacatctccacgcggtgctcgaagggcgcgagctgcctcttgctcgagtagatgtgctggtacacgggcagcagccagatctcgtcaaacatggggcgacagtgcctcaccacgcccatgtggccggcggcgcccgtcggcgggttcgccgacagcccgaacagcagcacctcgcgcggcgccatgctcgctagtagtcgccggtgcattaaaggtcagcaagcaccattggacgaaaaacgttgtggataccatcgctgattggtgaaatatcctgatcaaaaccatgattggtggaaaaagcggcctgacgtcattcgggatttggagctcttgggccaaagatgaaggtgctcatgcagcgcgtgaccagcgcctccgtgcgcgtggagggaaaagtggtgggcgagattggcaagggactgctgtgcttcgtgggaatcggacacgacgacacggaggacgacgcagagtggtgctgccgccgcctgctggtacagaatcgcactgtgtcacaacatggccgaccactaaactatccgcttactaaccccaatgcaatgcctccgtgtggctatatgcttacgctgtttaagaacgctcatctgtggcctgacgagtcggaccgcgcgtggaagacgtcgctgaagagcaatggctacgaagtgctggtggtgagccagttcacgctgcacggccagttcgcaggcaacaagcccgacttccacctcgccagtacgtcgtcgacttctcagttgctctgttgggtggagatgctgattgcttgatgcattgtgtttggtgtattcgtatcattttagtgggtcctgggccggcaaaggagttctacgacgcattctgcgaccgtgtgcgtcgtgagcacgtacccgagaaggtggcggagggtgtcttcggtgcctacatggaagtgtccattgtacgaaatctctgcaagcgggtgtccgttatgctttgctcttggcctagttgctgacgtcgtcgtgggtaactgtaggtgaacgatggaccggtgacgatgcagatcaactccaaggaccgaaaacccgccaagatctagaggacttggacgtggttcctagactgtgtatcaatgcacatatatagaccaagtggggtcttcaagccacatgccatgacatggagttctgattgcgttgctaaatttgacctagtgacagcctcgagtctgcgtgcaccttatgcggtactaaccccattcagattccgttctctttgccgcgcctaggtacacgttaagaccactatgccaacacctttggggtattccaaggtgttgcaggggaccgagacagacgcagcgggacctatctatcgctctctggcacaaccacgagacgctatcctgcaagacccggctaatccagacgatcctttcgtgggtctaacgaggccagaagcacccagcttatatcacaacttcatccgcactgctgagagctaccccgcactccagtgcctcggtgtacagcctcttgttgacggtgtcgcgcaaccgttcacgtggctcacgtacgaacaagtcgctactcgaattgccaatgccggtgcgggtatgatgcacttagacctgttgccgcgtgtgggggatgacgaaagcgaccgaatgttggctgtgtacatgaagaactcgattgactgggtggttgtggagtatgcagcgtattcattcagcgcggttgtcgtggcactgtacgacacgttgggggctgactcaacgcagtacattttgaaccagacagagatttcgactatcgtctgcacagctgcagagctgcccaagctcactcagatttcttccaactgtccgtacctgaaaactgtcatcatttcgggcgggtcaacgggcgacgcacaatttgaagccgagtgcgatgctagcggagctggtctcaacgtgttgcatttggagatcgtcgagtccgaaggacacaagcaccccatgcctgccgagccgccgactggagatgacatggctaccatcatgtacacgagtggaaccacgggcgatccgaagggagttatgctcactcacgctggaatcctatcagggtgcgctgctgttaaagacttctgcatcgcgggtggccacgcgttctcttccggcagtgtgtacttgtcgtatcttcccctggcgcacattctcgagcgcacatcacacgtgcattcgttcagcgtgggaagtcggataggcttctcgcaaaacaaccccctgaaactcgttgacgacatcaaggcactgcgaccgaccgtgttcgtcaccgtccctcgcttactcaatcggatttacgactcgatcaccgccaagatgctgaatgggaagaagtccgtggccttcctgttcaccactggagtgcgtacgaagattcgccgattgcggagacgcggaatcgcccgccacgcgttctgggaccgcttgctgttccgcaagatccgagcggggcttggactcgatcgatgtgagtttattatctctggatcagcgccactagcccccgaagtcctcgacttttgcagaattgccctcttggccactgttgtcgagggatatgggcaaactgagacttgcggtggagttactgctacgccattccacgatctgtccacgggtttcgttggcactccaaacacggccgcggagatccgtctcgagtccgttcccgacatggggtaccttgtgatggatcgatcgcatggagaggggtctgctgctgttccctgcatggggcgcggggagatctgtgtccgaggaccgctcgtcttcaaaggttactacaagcagccagacaagacagctgaagccatggatgctagtgggtggctgcacaccggagacatcggcctgtggtccccgttgggtcagctgcgcattatcgaccgcaagaagaacattttcaagttgtcccaaggtgagtacgtggctccggaaaagatcgaaaatgttctcgtcacgtgtccgagcatcgggcaaatcttcgtggatggcgatagcttccattcgcacgtcgtggcgatcgttgttcctgatgaagcagttattcgcttggttgcaaaggctaatggcttgctgaacgcaagtttccgagagctttgcgatcacgactcgatcaggggaaccgtgaagaaagagatcgaggaggcctcgaaacgcgcaaaacttgcaggatttgagcgtgtgcgtgagatctatctgcaccacgagctttttacagtcgacaacgagcttctaacgcccacattcaagctccgccgagccgacgctcaaaggcgcttcaagaatgagatcgctcacatgtacgagctgacaggtgacagcatcgtcaagggcatccccgatatcaagtagaaatccattgcttggacacaatatcgtcccgagccactccgttgcaacctgtggcaaacaccacagcttatctttgcagtctattatgcatcctgtcgctctgtaaacctagcaataaaacctctgcatccagcgctcctcagccatcgttgtcgtcgtaagggcgacgtctacttgcgaccaagacgttttaaccgtctgcggtagtgagagcacggccgcttgccatggtttgcctgcacacgtcgccagcatccacatcagactcctccattttacagatcttccgtctttacaccggaacgcacctttctgggttgacgcgcattgcgattaagcagctgcagagccacaggcccttcagtgagacgcatgcgctccagagcgaactccaggttgtcccgcatgttcatcatgtactgcggcgcctggggctttgctgctgcgggctctgctgcacatcaacggggagaaaggtctaaagtcagaccaccactacaaactggccatgccatctgaaaaaataacactctgccgtactcgcggggaaaagctcccacaccttggagggttgcgaggagaagcagcgacttgccgcctccgcgtgaggagcgacgcgcttgagcaccgctgacagcatcggccgtatcagagactgcaaccgctggacgggagacggaaactgaagtagacggagcaggtcgtaccaagcggaaaagtaacgactgccgcgttcattggctgaaaccctgtaaatcttccataggtaaaaagagttctcgttgtgttgcgtacaccaactatttttcaaattccagtcgcgctagagcagcatggccgaggcggagactggcatcttggcgggcttcttgccagaccgtacgtcgtccccccagggatcctcgccccctatcttcagtaccactgatatttcctttcttttgtggtcttaacggtgctatctctcccgttattgggtgcgtcgcagtggccaagaatatctccgaaagtgtggtcgatgtcacaggcgaggtggaaaatgctctgcaccaggtgggagatgctcagtccagcagcttcaacgggtaacactcatgctaatagcgtgatacgttgaatacttcagaaactggagtcgacaggcagcaagaagaagcaggcaaggcagctgaatgctgtcgccaaggtggggaagagagttcaatactacaaagctgtgggaggcccaattatcaatgtttgtgactcaattgtgtgtggtgcagggctctgggaagtacatgtccaaggttcatcgtgcattcgagaagaatttcgacaagttcgagctgtatgtgcggcgcaacattgtgtcggtgccggaggctctagcggacgaagtggctcagattcgagctgagaggcacaaggagaatggaggagagaaggcagcagtaccagaagaggaggaggatgcctcgctgtcgaatgaggagagggaggaacgccgtttggatgcacagctcgaagctctgcgactgaagctacgggagctcacagcatcgaaccaaagtttggagctcgagcagaaggcgctggaccagcgcacccagcagttccaggaatacgtatcacaagtctcatttctagatgacatgccagagcgggctatctccccattgaagcgcacggcagagcacatttcggccctccacgaggcctttttgcagatggacagtattcaggcagcattggaagaagactcgcgccagttcaagcggtccaaggtgacaactcgcggcagcttccggaatctgcacaagcggttcacggcaagagcgtcagaaatgacgtaccgaacgaccgaagatctcgaagatctccattccaaactattgaccatgtaaatcctccgaaggatttccacagattcctcccctgtatgcacataaaacaatgctgtttaagtttctgttcgccgcgcccgtatctctgatgttttctctacagctctccaggtacagtgtcaatccaccctttcgttcatttttgtcgggttttattgtcctttcaccaggcttctctccagcgaataaaacgacccagcagccttcggcagctagcactttatgaatagccgcgtctccgctggcaagaacctgttctgctgtgtgtagatccaagcgcgattactcctcgtcagcgtcgtggaggtcgtccatgacgtcgtcgtcagccgagtcctcgctctcctcctcgccgtcaatctccacgggcatcggcagcgcgccgatttccgagcgctcgtacttgatcttgccgttctccagcgcgtagcccttgggcgccgcctccgagtgcgcctcgtggtggccgtggccgtggccgtggtcccacgggtgctccaggccctgcacaatgcacacaaacacacaaacgcattaacaagttaataaataattattgcagtaactatataacgctaggatgcacgcaccagcacgacgcggccgtcctgttttgcccgccagaagacccagagccagagcatggtgccgtaggccagcgccaggttcttgtgcacggggctcacgtggaagtgcatgccgtgcgggtagttgtggccgtggccgtgcgccgaggacatggcgcgacggcccgaggcggcggccatgcgacgagcgaggaaactggcggcgcgcatgtcgggtcggagctcctgggctttggtagtagcgttccgctggtctgggtcccccttgaaaatgagcggcggagaagtcgcaactgcgattggctgaaaatatggggtcgatttcgacgaatgggagagagctgtttgattattagcgaatgggaatagatagcaaccacttcaatatcgccatgcttgctacgatcatcgcttttgtttttctgaaaaggagtgtgcatatttaacgttaggtggtgctaagtttcgatgattgcatgccttttatcgactcagcgaccatcgagcaccacatttctaacaagatatgtagcgttcttctggtgttaacaaaacacgacgttagtcacttgcagaacactgagtgcacttgcttcccttagatcctgccaatacagatcctatcgtccactcatatccgcattgaatcggatagtgacttagaaaaccaggttcctatgcgcgtttcaaaaaacgtgaatttgtccgcatggagtattgtaaagctatcaatgcatattgcatatacgatatcgatcgagaagcaccgaaaagttgggtagaacagctaatgtaaagtttttcgtaggagtggcaatttagctttatatttccatatctgcgaggttctgtcgattgggcactacaggatagctcttttgaagtcttcgatcctgtgaagctaccttataggatgatgtaggcgaatgctgactattaacaacgggttcgggagtcaactgtagccttcccggtaagtcgtttacgacgcgagttttgcgctgcaagttgcgtggtaaagcacttggtaactaacttacgaatatctatcttataaacactcttaggggctcgaaggaccaacgcagagtatgattcactagctacgttcccataagtgcactttgcttcgttgttttaggtaagatttagtgagggatttgcagctctaggaagatatgtaatgtaatgtgtcgtgtgtggggaaacagcggtgtcctgatattcgaacttagtgcaacgtacatgaagtacacaacaacactacagctcttcagtaactggatgtttgccaagtggtaaaataaggttcggatagccaatgacatgcagcgaaggtgttcaccgcccaatatctcggcttccaccgagtgctgcaaggtaagcttaacgtgaaaattcttcaatttgtttgttttatttatatcgctacccagtattttgctttgcaatgatttggcaatatgaggcgagatttgctgtatttataacgaccacctgctaggtttacaaatcttaaattacgataaatcgaggtgcataaatgggtggaggcctagaattacgctaaaagcgccacaattgcactttcaaaagtgcaattgtggctgtgcagctgcaattctgtcggtttttatccacaagcacctacacacacggcaattatgcataagagggtggatgtgctggggaccatgaacggtggtgtacggggccaatgcatggctgctgacaggccctcccaagtcgatatatatatatgaggaggtggattttatgcataattttagcaggtcgtgtatcttctttcacacatatttagaggctttgccatatttagcgtctaaaatggtcggcaaaataactgcaaagcacaatattttctagcgcaaaatttctaatggttcagcttaccgggaggctggaaagctacagttgtattccgaagcgattgttaataatatgctagtaccggtagggctgtggaaaatatgattgcgattgtaatattgccaagattgtccatcacaataatggattgttccgtgatctcaatcggcaatcccgttcccatattgttcctatactcattttgagtctttgccagtgatccggtagagcaatatgcaacaccaagcccatggaaccgatcctagctcctaaaaagcctttctgcgtcttctgctacttcgaaatgcggattcgaggggcctggatggggtacacgctcaacatgatgaatataaaacccaacattgcattttgccaaggtttttgaaggttaacaacaatgtaatcaaataagcaaaggtcttagggcaatagcaccgccaagcgagtaaaaatatgaacctagcagaggaagtacaagcgagaacttagattgcaatcttttgtttttgagattgtcgagattgcaataattgattgctccagatctgagccgtcaatcaataaacaatctaaatttccacagccctgcatattatatgcttagcatattatgctagtactaatggtgcactgttgatcgtctggccatggtactgcttggtacacacaaaagccacagctcttaacgaagtacagcttatcgctaacatgttcgggctgttcccacaggaagtacgtggttgttttaccatgacgttcaactcacgtttaccttctctgcgctttcggtaactctccgggacctaccttactcgaatactcaaatactcgtcgagctatttctacgcagcgccttcagctacggtagataccttgaatgaatacgtggtaaaaaaaactgaaatgcgcttgatcggatataatccgatttggtctgcgatagcagtagaaacgttgcttcctatccccgtataacttaaccattagaacgtactactatgtacatgcatatacagtaatttgcctcaatagtgcaatggctacatttatacattctctaagctaattgaataggagagtctagctgaactctcattggctggatttggggtgtgcacagatactcgtttcagcagggtattcgatgccacgactgcgctattgaggcaaattactgtatacaaaaacaaagaaaaacgaaatccttcagcgattgtttactgtacacgaagggattcaattagaaatgtttgaagcagcgatggttagaatgaaggaagatacaaaacagttcatactaaagatacatactcacaatctgctagcttcaagacttcaaacgagtgctatttttctgggcaagcagtggtccttgggaaactgctttctttcggtcattacatgtagctgccacaaagttttgactaccaaactaactgctgtacggtaacttcggtgtacagtatccggtcggcacaaacccggcaagttggcgggtctataactcacccccttacgtctggtacgttatcatgcggtccaagaaacagcatgatcaggcttccaaactgaatacaggcgtccccgggctagtcccggctgtatatttttatgtacctcgcacaggaagtacaacaagctctcaagatttgcgcgctacttctgcaagcatattgatttagatgagtgtacagcgagacctactgcgacaagtggcacgttgcgggaatacctccaccgtattcttgagctaagcttgaagtaagtcagtacatactcatttatgttcagaccgcgtgaatcttgttgattcgcaaacatcataagtaccactgtggcgaataggccggggacgcctgtacatgtagaatcaaaaccgtgtctacaggaatttagggcatgaacgacgagccatctcaaaagttcacgtaaggcgtagctttaaaaaatagtgaggaagtctcgcaccatcgtttcacatcaataactaaagcgtgttattttgggtgcttcaaaatttgacatttaaagcctgcaagtggctgcatgtagtgcagtagtcagacaatgaagaggagaggtgacatgcaagcacggtcagcaaacacacgcctcatcgcggtacagtgccctagtacaatagaatacgtacatatacgtgtaccgtagttctacatgtaataaaggttgaggaagctctgcgacacattgtgaatacactatactataattctcgtcacccatgtgaactagtttcggatttcggactcagtggattttcactttcattgttggtgttctgacagtaataaaggtgaaaataatactcgtctgggatgaaagacgtcagatagaattgtatcttgagaaaaaattctcaagacagttcgagaactctacattttttattaatgtagagttctcaaagtgtaagtaggatggtagtggcatcctacttgcatcatgccactacaccatttcccaggcccgttgaaaagtttcccaaaatggctcgttggctagctctaattccatgctgtgtggcgccacacaatttttattttcaggctacagtaataggcgaattgcatgaaaaaggctacttgcatatctgcccatcacccgtcccaggcaaagtgaacagactggtaaaatgcatatgacctcagatgttgcatacatcggtgcccgagcactactgtaccctgcacgaacaacaccaaaagtggtcgaaactagctgagacttagtcatccactgcacaacattgtagtgagtggctgagagcagtttggggcgtgtatgcctgggaaatggtacatctgtagaggagtttccataaatcagtgattttcactgagatttgacaaaatgttgtgatagcttgaaactactgactcagtgctttggtaaatagtaataatacagtagtatttgtgcagcctttagattgctatgttattccgttgtgaaccgaggggttgttgcaatatctcgttgcgtaagccgcgagtcgatgcgaaggagaaagacaccacggcgaaggctgtagtctactgaagtacttaagtatgcgttgatatgattccccccttcacgactgagcagagttgccgcggtaagaaacttgcgagaactgagtaccgttgggagccaacatactaaactaatatgaaccgaaaacctttgcggcgcgcacaatgtttgcaggtggacatccgttactctatgagtcgtcaatatactagtagtagtcaccttatcgcaatatttacaattgcataactgtaacccgctgtttcgtagctctttttccaagtagttcgcgaagctatttgctaacgatcagggctaataaagcccaaataaccactggtattctatctgaaataattaactgggcatcgcattttttgcgcaatatgaaataaatgcgtgcaccagtacgaacaatatttgctgttatgagcatgcgcaagttgctgcaacacggtataatatcatcctcaacgagatgtttacacgaactgcatttatttttttggtaaaatgtctctatttccaaactacatttattctgggatagcagtaaagctgctagcgcagcccaaacccgatcatttcaagtcgatcagatgaagcctcccgttaaagttgggttttaactatttagaagattctagactcagaaattaagatacaggaattaatgaaggaagatctcacatcagaatctcttactcgaacgcggctcattcctgagtttgcagggtccgtggacgaaggacctgtagaggaggttggagcggttggtattccgcaaggctatcctattgctactttgtcactttaataggactgggtacttggcttcacataaccttggtctattgaagataacctattttatctaaagctattaccgcaattcgcatgttgagagctgcacccgcttatgagatgcacctacatcgaccaatcatatgaagcgatctacatatttttatccaatcagaccaattattatacccggcaaataagatataaccacaatattacagttgtgacttatacaacatgttgaattttgtatatgatactttttaagtacgaatacagatcaacattaccggggtgaacatagggtgcagctctctacatgcgaattgcggtatggatgcatggaaaccaaatgacaattttattttagggaatgcaccatctcttgggtccgttgagcttatacactttgtcctatcgcgaaaaagctgggttatgtcggcggaagggcagatgcaaaacaatagtggagaagcttagacccttgtattttgttgagtcctcaagacgaccaacgaataaagttgcttcaatattagtgcagaataacagacaagttgtatagtgcaaaaagtataaccacaattttatatagtatttttgtaggtaacacgctacctacgtgtactatttgtagtattactatagttccaaatttgacttgaaaattgtatggacgtgccagtactatactactatacctgcgtcagtgaattcaggcaaactgtcacaatcattttgtcaaatctcagtgaaaatcactgatttatggaaattcctctacatctgtacggtacaaaatgatcggcaaatccagaatcaaatcccatattgttaccttgacccatctgtttaaaaaccatgcatacagacgacttacaaagccggcagacacaaaaagccggcagacgaagtcaagcaaagcttaacatgagcaaaccagccaatcagattcaatcaaatgacttcatctttgtataccatctggttttgtgtactttatatgctttcttgtgtactttatgcaacacaccgtgtgttttatgacagtttacagatttgacgggagggaatttatcgttgtttttatataggaggatggcattaagcatgccggctttgtaagtcgttgtctgtagtgcggcggtccgaccgcgtgtggtgccgcacgagcaaaagtcgccgtgtagtcattccagaatttgccccagacgcggtaccacctcagtagagagcgctactataggaagtcaatgcgcggattcgcactacttgtggccatcgccactctcctggcagctgtgtcggcgacttcgctctctggtcagaccaagttggtctccggtagcgcactccccagaaacacccaacgttctctcccaagatgaaatgaatcatgtttccctattgatgcatttacatgtattataagggcccttgacggtagtgactatcgttggtataatctcagtacgggataaacaacaaagcgtgtatacagttgcgaaggggtcagaaacattgctatctttcgcttcatcctccttgttagttgaacgacgccagtccagctcgaggtaggtggaaatggcgttgaatgcctttatatatcttctgctgcaccaataacctaaccacgcttctgacctccatccgaacttcgtatacgcggtatactttcgactttcaaccattcattcgtaagactgcggcgagccgccacacgcatgaatccccccccgccgcgcggtcgccctgttggccgtacaagcatgcgcatgatgtcgacgactaccggtagcgcctagtggtgctgcagcgacacctcgtggcgacgatgacatggagcgctccctggctggctgcaagactgcggtcgacgcaacacaaaaggcgtcagagcccctccccttcctccctgcgcgcgtttgaagagatgcacgagcatcaggccacctctcagtcctgtcaggcaagtaactgttcgggggagatctatgcattacttggtgtattcatactcgtgtctgtacgcgcagcggccagctttaaccggcggagacagaaggcacttcctgctccgctttcaaacagctttaccaggagaacaagcgaaagagcgcaagcagaatgcgtgagacttcagcgtttgggatcagttcgagggcggggctcgctatggctatcgtcagtcgggtacagcggtatcagtcggggaaaataagcttccagtcgggcagtcggatacggtgacgggtgacggtgttctcagtcgggtaccggtggtgatgtttgttgtttgcttggctaggtcaacgcatgcgctcaagttgtttacctgtacaagactacagctcgtggcgtggccacaagaatcttgcgagctgttggttggagttaacgtaagagaacgatggaaaaaacaatgtaatggactgtccgaggtgtgtagtgtcctgtactgttcgaaaattcgctccccgtaagctatgcacttagtcatttcacttagaggcctcagagagaccatttgcaaccgaagcaaagcataggtctgcaatgttcggcgcgtgggccggaaggtatgcctaagtaggagtttctatctaatccagatacctcgcctggccgagccgaggacttagcgtaaggctcgagggggtggggcaggtcgcgcagcggcgcccctcgaagtgccgttgctaagtccacaggcgagagccaacgtgagagtgtcctaccctctttaacatcaagtaacaagtgcttagtcgctttggtggtcggcattgggccttctcgaacattcttcatctaaccggtctatacatggagtgtggtggggtctgggggtatacaacttgcttcagttttggtcggttcttgacggtcgtggtcgggcgcaaacgggtacaatagtctcatcacagcccagtcttccatatggtggacgggtgcagcaacaagtgccctgcttaaatgcagtagtgaaaaaagaaagtcaacgcacgacggcacatgcccctgggccgcttctttcaaaatccaaaaccaacagtaatcatatgcggcgggaatacagttttgaaaggcacgtcgtgctccgtagcttggccggccacccgtcattccagaattcgctgaaaacctaccacgccagtgcttaccaagaacaatactaacatgtaaacagtctttgtgcttcctggtcatggtcgtggccatcatcttcgccgcggtggaagcaaaagcttcggaggagacgagcgtcgcggttcaatcgatcgaatcgatcaatgccaggctggctactggcaacaagcgaaacctgagaaccaatacaattgacaagggtgctggtgacgacggcgaggagaaggtcggcgcgcacattgaggaaagaggccatcaccaagttggtctccaagttaaaactgaagtggagggccatgaaggacaaggatttccgcaacgcacagttgttcctgaacggtgggaccaacgagcagctctacccgaagaaagtagatccgttcaatctcttcgtctacatggagcaccacgccgctgccaagactgaagcaagtagagcgcgatggtccgagtacttcaagtactggaacaaacggcatgacgaaaaattcgctgcggggatgtaacaccactcactgccaagagcgtaatgaacaatctactatccttgaatcgacgccaggttttgagccgccgatctcagcactacactgcacttcccatccacaagttgtgaattatttgtggaagtctgcgtgtcgttatttatggcgctcacatgtcaatcgggaccaaaaagcacattaaatgtgtcaaaagttttgactgcggtatttgctggacccatttgaccaaaaatgcgaatcgatggccatgctgtcgccggcgtcaacttcacgtgccgctgccgcgtctccccgacggctctgcgctcgcgtcctcgcggatctggtcaatacgcgctctgcaacattggcgagggtcttttcgccgtttgtcgcgttgcgctgagctcagcagccggctcctttgccacccaagagcccctggcggacgcgtccgtgacactgcgacgggattcacgggcttttaaggagttgcagtcgtctctgcttgttcacaacagcgaggcaactgatatcaatactggaaacagctatgggctgcagtggatctctcgtgcagccgtacgcaccgctgtggccgcgacgctggagctgatcccctcgtccaagtctcagcttgagcaccaacggctgcgcgacccagacacccgcgctttgctacagcagacactgcagcgcaactttattgtatgtgccggagcaagagtaagacttccgacgctgaacggactcgtggcggagagcagaggcctagaagaggaagggcggcgtgaggtgatgaccttccgtgtggtgtcgacgtatcccgctggagggttcgctcgtgtgacggctgccacgcgtgtgacgttgacagatcagagcgaagttggtggagaagatggaaaggacggaagcggtgactcgattatggcgatgccggaccagcagcagacaaagggagtgaaggtgggaggcatggaggacgagcgtgctgcgcttcgtgagctgattctgctaccggttgcccacccgcgactgcgctcggatttgggtgtggagttccctaaaggcgtgctgctctgtggcccgccaggtgtgggcaagactctgcttgtccgatcggtggtgcatgagtgccgtcaagtgcaagatgcgtctggtgcgaccttggatcttaatctacaggtgatcaacggatctgagattatgactagcgggcgtggagatgcagagcaggctcttcggtcaacgttcgagacggctgtggttcatgctcgtagtgcacgtcacgctgccagtgtcattttcatcgatgagctggacgccctctgcccaaagcgcgaggctgctggaggaggcgcctcgtcagcccacagccgaattgttgctcaattgctgacactgctggatggtgtggaaggcggtctatcgcgcgagaatgtcgtcgttgtcgctgccacgaatctacccaattccattgacccagctctgcgacggccgggtcgattcgatcgcgaaatctatgtggcaccacctaacaccgcgctgcgcaaaaagattttcaaggttcatcttagcaggacgccctacgctctgagcagcgattctctggatgatgcggaggctcgacgtgatgtcttcctcgatagattggctgcgaaagccgtcggatacgttggtgccgatatcgctgctttgtgtcgcgaggctgcaatggtggcttcaacgcggcagcttgtggctctatctcgggatcgcgaactggaacagtggtgggcagactggaagcgccgagtagagcctctgagtgctctgcagaacgcgtcatcaaccctaggcgctgtggttgctggtcgtgcttggcacgccaatccaactgcgattattccactgtggtttctggctaagcaaagcaaccagcatgatatcgataaaaccgcggatagcacgagcctaccgcagtctgatcgggagtatttcggttatctattaggtagcgaaggcaaacgtacctttgcccctgcgcatcacggtgagcgcgaccagaagaagatcgaagcatttgaggtgaccatggaggactttgagcaagcgatgcaaaccgttgtaccgtcagctcttcgaggtgccagcggatttacgtaagtactgctttccattgtttacggtttgtttctgctaggtactaacacactttgcagtaaggacttcgagcgacaaggctgggatagcattggcggtcaggctgagaccaagttggcgttgcagcaggcactcgaatggcctattaaattcccgcagacgtttgctcgactgggagtcaagccaccccgtggtgtattgctctacggcccacctggctgcagtaaaagttcaatcgtccgtgcagctgctcactccagtggcgctacgttcctgtcgctgtctgcagcccaagtgttttcgccgttcttcggtgacgcagaggctgcagtgcgtcaagttttccgcgatgcgcgtgcggcccttccagccatcatcttctttgacgagatcgatgtcatggttgccaagcgtgagtttgatggatcaggcggtggagagggcggctcctccactgccatgcgcgtgctgtcaacaatgctcaacgaaatggacggcgttgagtcagccgaagggcccctggtcatcggtgcaactaatcgaccagattgcatcgacgcagcactcatgcgacctgggcggtttgatcgcatccagttcgtcgatctacccgttgaacctgatcgtgttgatattctgcgaattcactcgcgtcccatgcaacttcacaacgacgtcgacttgttggagctggcaaagcgcacgccgttcttcagtggagctgaactcgaggtagggcgccagcacttgtattcatctattcatcactttctaacgctgttgttgatcgtagaacctttgtcgcgaggctgcattgcttgcgttgcgcgagtctctggaggccgagaaggtctgtaagcggcatttcgaagaagcacttcgcggtattactccagtgtcatccaaggagtccatgcgcgactacatcgagtttgcagaggccatggggcacctgtcataggttagtcaaaacaccaagcaatgttcccatcaaacgcaatagagtatatatttctgcggcgttctgcactcgagccatttgatttctctctcagttcttcccgtgattcttgctcccgtatcccatctagaagagaatctcgccgccatccgtgaagctgaccttgtgctgcagagggatgccgtctctctccacccctgcttcctccatcttgtccacaacctcgaagccttccacgacctccccgaacaccacatgcttgccattcaggtgaggcgcagcacccagcataaagcagaactggctgccgttggtattggggccggcattggccatctgcaggatgtacctcttggagtgcttgagtctcagtccattcggctcatcgtcgaatctgccgccgtagatgctgcgtcctcctgtgccattgcccttggtgtagtctccgcattgcacgatgaagcccttgagaatgcggtggcacgtgctgcccttgaacgagtagtcggggcccttctcgcccgtggtcagagctcggaagttctccaccgttttgggcacgacgtcggcgtacagctcagcggtgacgcgccccacgtagacgccgtcaatagccacgtccagccacacgtacttgcggtctggtttgggctcccaggagcgcgtggactcgggaactggcgtcttctcctcgagtttcgcctcctcctgcgccacggcgtccgcgaactccctgggctcgtccggctgctgcgccaggtgcgggctctgcgccgacaggtcgaagaacacgttcaccaccacgaagtaggccacgaacagcagccccatgcccagcagaatcgccttgcgcgcgtccagcgcgccgccacctcggggggccattgtcgatggaagtttatctgcgctgaacggatacactcggtagagatgggtacatacgatcaggttcgacaggttttggtgggtcggtagaataagatcaggtgcaatgtgtgattgaagattctcgctcgcaccgtcaatcaatcgatcagtgcgcggatagaaatggtatggtacagtacacagcctcttccgagcggtgcctctttcgaacaccaaaactcctggtgctgccattccccaatttcgcacgcgaccggaagccccaactccgctctagtgtgaaatactcaactccacgctctaggcggcgtctttgaccttcgacttgcaaccatgggcttcagcattccggactcgccgcgtggacagagcgacgctgcgacgcaatcagagccgacgctcgcgccgtctcaagctggtctgcgcgaaggcttccgccagtcgctggctgctcggcggcgcaatgccatcgtgccgggatcgctgtcgtttgacgcattgggctcgccgcggtccccgttcgtgtttatgagtcaagaggaccgtcgagctcagacgctgcgtcaggcacagggacaggagcagcaggcaagaaggaaagaggtgccaagcatccgccgccacggaggtcaaggtacgatgacgctgctttaacgtcggaggaattgtaatcagacgcgactcgctcacgctcgcatgttacgttttgctgggagtagccgagaacgtcggagatgggcagaacgtccaagacatcccctgagacgtggtgtccgagttgtctgcgtgtcaggatccgatcgcatcgagtcgtcgacaggttgaggctgtggctgtcgaaagttttgtacatacatcgatcggtgccaaacccaacctagttttgcggggaatcactacttgctatatatgcagtttgcctttacagtatacatctaccagtgcatgtctgacttgcatgtccgctcttccatctacacacggatacccttgtcatcgtgaggtgactcatttgatgacgatcgctggcgcgaaaacccagtttgaatttgcaccacctctttccccaaaagtcaatcggattacatagtgcacaccaatgtggtacataaccttctgcggagcattgacctaccacaccaatcgtacaccaaagggggaagtctggtgtacgccacattccgccgcttccgtccaaagtggtcaattagagcagacctcccctccatacgtacagtactgtaaccaagagctacgtgacgtgaacttaatgagcggcgggggatcgggcgactggcactcggcggccgaccgcctggcgctcttcatgcagcgctacgccgtgccggacgagaaggtggcaaggcagctgggctggcccgaggagcagctgcgcgcgtatctgtcgcccgaggcgcggcgcctcaaggcggcgtccgacgtacgtcgctccttccatccagtcagccgcactctggcagtattatcgccctctaactgtgctgcatatgaactgtagattgcggacacggcggtggacaagctgctgatgcggtatcgcgtggcgctggcgcatcagtcgctcaagagcgccacgaccaagcccctcaagcctctggacggcggtgccaggcggtcgacggtgcccacgcaggtcggagagcggtgaaggaacttcgtggcggaagaagaggacgctgacgactgtggtgtggtgctgtgtgcagtttggacgcaacgtcagcgacaggaggagcatcatccatgcagacgcgacgcctgcgcaattggttcgtgcaggttatattgtaagttattattgttgggagaatgctgagtgaggctgtggtgtgtagaaggcagcggcggaggcggagcagacgaatacgggcaataggaagcggaagcggagggccatcgtgcagcctttggacgcttcacgctcgaagatgaaggtcgctgcgctgaaagaggaagcgaacaaggagaagggggttacagactcaacgacagatcagcttgatgtgcggaagcctcagcgattgaccaagtccgagcttatctgccctattcgtctcgatgtcgacttggatggcgttcggttccaggacacgttcattgtcaatgcgtacgtttgattggcttggctgctggaatggtggagttgttgccttgacggctatgctaacattggttttggtgttgattaatgtgggtagtgccctgacgacatgttcaccggaagttattgctacgcaaattgcccatgatgaaaaaatgagcgataagctgaaagtacgtacttgcttttgtctggcgttttgattcgctttttattgtgcgctgactgtgtcgtcttcttgccttcaggatgctattgcagagtcaatccggagacaaattctgacgtttacgtcttgcttgagcaccgagcagaagggtgggcggatataccctatctacttggatctcattattgacggcttctcggtacgtgcagtagaatattgagaatggttcttagatttattttcttctaacctaccgcatgctttgttccaccttacagctccgcgatcagttcgaatgggatatctcaaatgactgcatcgcgacgcagacatttgcatgtacgctttgcgcagacatgaacttgcccaagaagttcgagccagctatcgtattttcgatctacgagcaggtggcagcctatcgtatcgcactgagcgggagcaaatggataggggcgaatccctttcaagtgaagggtaccggtgtcacgctgccaacttccagcgccggttacattgaagttatgccgccacttgatgacgtcgttcgtagcacggccgatgcaagtaagtactgtatctgagtttgcctgccacgcatgcagctatggggagtctaacttattgatccatgtttgttgtgacagaattatggcagccagttttaagtgagctgtccagagaagagaggacatatttatctgcgagacaaactgctgctcgagcgtgcgccccactgccattaagtagttcgtctttaatgaactcattgactaacgaaaattttgttttgcagacctacaacttggaagagcccatcgacggcctcgcaaaccaatgggcgttcgaagcggcctccacgcccagtagcaaaggttcgtacatgtgctggcccagtgaatcgacctcttgaaagaagttaacctagccgtgcgatgaaaactaacaacttctgttgctttcggctatgcaggaagaccgtctacctcgtccgatcaaccctttcattgtgtactgccaaatgcagaaggaggcattaggcaagacgcgccgatctgcgtccgagacgaggaaaatcatgggcgatatgtggcgcaaatgcacggatgaggtaaccttgtaccgctagctagttgctatatcgattcctcggtgccaacgcgcgtttgtgttggcgactaccaggaaaaagagtattactcgcagctgacggaggtagagaacgaaaagagacgtcgcgaccacattctggacatgcgcgaccgcgccattgcggattgggaagaggatgaagctcgccggaagggattgctggcctcgacgaccctagaggcatctgccgagtacttccgaggtctcttgcttgaagtaagtaccctctctttatgctcagtgacgatgtaaaataccccaaggtgctgacgtgtctgtatccaaccagaactacatgagcgagcggcacgaagtagacttgaacaaagtggaatcggcagcggagactggcgaggaggacgagacggacgagaacgaagagacctagactgtagttaaaccaactgctgtgtgcatggaagtcttcatccaatctggaatgcgcagagcgagcacgacataacaaaacgaagcccccgcagacactcaagagcgccgcgttgtctccaccttctgctgggttgtacactgtatttcctcaagtggctaaacatctcttgctacgctctctactccacagcggcagtgtttcaatgatccgcctcatagatctcaatgcctgtagcgtccagaatctcggagcgcagcagctccaccagctcgcccctgtcccgcgtgttcacccagttgccgctctcgccatcgtactcgtaccgacgcggaccactgcaccagcaccaacgtcagagtccactccaccttcatgtagccatcaaataaactcccagccccagcgcttcgtacctgatcggagaggaccaccagatctgccggttgggcacctggcggttgatcacccacgtgccgtggtcgcccaggtcgatcttcagcacgccttgctgttaacacaccagtaggacgtcaggatgtatgacacactctatctctcagtcacttcaacgcgccacaacgcaccgagaacatgacgtcggactcctcgagcatctcctcgatgccgtccagccagctctggatgtcgtgcagcgtctcgtccgccagctccatgaactcgtgctccgtcatgttcggcggcggcggcggcgcgtccgacgagaagcgcgcggtccgcagcgagctgtgacgaggcgcgaccgtcgcgcgcacgggtcggcaggcaggcgcgagcgtcgacagcgccttgaagctcggcgccgaggcgcggcgcgacgcgcagcgcagcgaggagagagccacacgccgcagcatttgcgttctggtggcttgggtcgcgattgtgaagtgagcctgttgttggatgggctcacgggttttcgaccaatgagagggcgtcgacaccacacgcaccacgttttgaaaggcatcgcttttagaaggttttcagatcgatctggaaatggccaagaagcggcggcaggcggcagcgccgcgggcgtcggcgacaacgagccgagaggctccagtggacttggaggtcgttgagaagtcgctcgcgaagatgaaggcggtttatgaccaatggggtgcggatgtagtgggagttccagcgagtttggagcgcactctgctgctgcacagcctcgtggcgctcgtcgtgcaaaacgcactcatgatagcgcaggtacaatccttcactgcaagagcaatcagcacagttattatatatatgaattgagattgagtttgtgtgtatatgcttgggcagggtgtgtcaatggcacagatcgttttggtagttgggactggggtgtggatgatgaggaaggtttttgtggcgatgctgctgccacacgtcgctcttcgaggcggcagccgccgtgaaagttactggagaggtgcaattttcatgctcgcattgggtggattgggagcttggttttatcggacagaggtgcccctgaacacgccacaagtcgtgcttctcgctatcgtgtagggtaacaaggtgccgtattgtgtgggcaatgagaggaagctcatggatttttggtgttattgcgctgggttcagattgctgctggatgttgtgtccattttcctcgttacgagcgctaagggccgccttacgcccggacagatcgtcttttcagcggtggaaaccaccttcttggtggcgggattctctacatacttgaattacgtaaggaccgtgcgagttggtggttgttcgacggagaagctaacatactggtgttaatgtgcatgcagaaggaagagttaattttcgataagatggcgttcgcgctcacggcggcaacagcttttgttcacgtgctagaacttctttcggcaaagtacgtggtgctccactgctttggcacggatacgaacggctctttcaacaagcagcaacggcgcggggccaagttgatggagggtatatggcaggatatcgatcaattcgaacccgaacagcttctcttgggcaccacaaaggtacgccagcgaatatgttgagccgtgtaaacttcgaagtgtttaactcccatgctcctccgtattcagaaaaagaaagccaaaaacaagtcgcgcggtagctcttcgaaagatgtaaacgcagccaccgatggcaattcagacccggcactgcagatcaaacaatccgcgttcagggagccgcgggtgcagctcgcgatcttgacactggctcaagtgctgcttctactgttgcagctcgtactctcaacattcgtgttgtactcttgggaaatgatgaggtatgttgccgattgctctcagactgtagccatggctctaacttcgactgctctcgctttgtgtgatagtgcgttgttgctcagcagctcccacgttctctggaagcttggccaagtgcgccgaaaagtgttgccccgcagtgcaatccgacccgcggagctgtcaaaacacaagatggagtagatatcaccgagcgtcttcaagttgctattactcttgctgctcgctacttcagctagaagtcgacttggtattttgttctgctttctgcattgcttctgtggcagcagcgcagcagtcgtagtagcgcttgatgacctccgcgcacttgctctcctggtagttgcgccgctggaggcagaactggatggcgcacgcctgcttcttgcacacgcgctcgcacagttccttctcggcggccattattgtcaacgtccctgtcgattgtgaggccgtcctggggtatcgagcgtatcagccaacgagattcaccgaattagcgcaatacaagagcgaagataagagcaacgctgcggcacgaatgaacgctcgtaaattatgaagatatatgcatgacttcctgcctcaatgccagagcactcagaccagaggatgcaagcatccactcggctcaacttgcttgattaacgcctgccgctggatcatactctccaccgatctctttagacagtcgtgtcctcctccttgatcgtcgtggccttggcagccggcgtctcatcgggcggcgtgtagtccgggacaccgcgcgtgaaggacgggtgcttcgtgatgacaaagtagttgaagtacgcgtttgcgaagcccgccaggaagacgagcacgccgtagatgccgcacattccgaacgggaagatggagatcctgcagcaaaacaaataataattagcacttgcatccattgtgtcatgttctggctaacgtgtcagccacgtacatgctcagaaagaggcaccgtccccacggactatacatgaagccgaagctgccacgcagcagcttgtcgatgtacgcggtacgcagctcgtagcccacgaggatcaacgcgaagaagctgcggaaggcaacagatacatgggataacacgtcaggttcacaaaccacctaaactggtgatggcaacagggttgcacgcacatggtgtagatgacggagagcgcgtctgccatgacggagaaggccgagtccgactggataatctgtcccacggcgagagcgatcatgcagccagccatggtcaagttcacaatgcgcatggcggacagcacgccggtcacagaggagcccataatgctgcaaggaatatacacaccataggttaacactcctgaatacaagacccccacttttcacttaaagttggtagttgccataaaggtggatacgtacatctcccgcgtcttggccttgatctcctcccacacctcgctaatggagatggcgtccgccgtgttcgtgaccttgtcggcggctgaaggcggcgggggcggcagcttcaggtcatccgggttcagcggcggcagtttgccgtaggtcgttctagataaggtgaagacaaagtttaggtgaaaaaatggttagagatggttagagaatttttccctcccctcgtcgtttagacacatcggacggacggcaaggcacgtactcggctcccagcggtccggcgttgagcacggtgcctcccaacacggaggcgttggcttcggtggtcatcctgcgaatgctgtctagctgtgtgctcgcacacacgcgcgctgtcgaggaactggagacgcgcgctttaccgcgggcttgggcgcttcttccgaggccgtttgacttggcttttgtatggacggcaaatccggcttccactgtttctcgggggatagggcaataatgtcacgaatatattccgtattattggtaatatttaatgatacatacaattaattgttcgcgggtctttttgaatttgaaaatcgacactttgggacgtttaaagacaccttggggacactgtacgtgggggctctgtgtggagcaacatttgcttgcgcagcttaacattagataataagttaggtgtgctcaaaggaggcggggcctccgtccggcgcggcttactggcagttgacctcgggcgtatccatagacgacattgacgctgtggacgccgttgacacgccactgcactcgctcatgctcctgcacttgcgcggggtgctggccacctcccttgctagagcgaggtggttcctcctcttgagcgcctcgacacggcctttcatgttctcgacctgctccagccaccgctcgtccttctcaaagtccagcaaccgagacgacgagttctcgatcctcgacacgaaggcggcgtagctcgtgcacggggcgcgcacacgaagggagacaggtgtcggcgggggcacgtacagcggctggcttgcgtcattggagcaagaggaagacgtgcggctacgcggggcgccctccgaggagggcttgcgcaccgagcaggccgccaggtggaactcgcgcgatttgggcggcggaatcttgctcataagcagcgagcagttccgagcgggcttggccgcaacagcgggcacctcgctcgtttcctggttgtcggcgtcgatggtctcatcgtcctcctgctcttcctgttcctcgacagcctccactgcctcctgctcctccgcttcttccacctccagttcctgttcgacctgctccacctgctcctcctcctcgtcctcctcctccatctgttcctgttcgccctgctccccctgctcgtctgcgtcctcggtcgcaggctgttccctcacgaggcgcacggtcttggtcggaagaatcacgcggggctcctcgaccaccgccagcgcgtcgtagtacgtcaccaagccgtagacattacctcgtcccggggagtcgagcggctgggcggacggctccgcacccgcggaagccgccaagctctcgaacatctgcacgatgctgcccactgtcatgtcggtgctcgccactaactggcctctgtgtcgctgtctctggggcccaaactctctgaatggagagagagaacactgcgcttgaagaagttccgacggagcggcgacgaccgggcgacgccggattcacgtgccacgctgggcgggctggcagacgccgcagtcggtggctggaatcgcgcgctttttggtctgactggccagtctctgtggctccggctaactcgatccgattggccacaaatcttgacagtgggataagaagccagttttagcggggggcggaccatattttccctaaaaatacaagcaattagacctccggttaatcatagcgctcatatgggcaagatttcacaagaaatcttcgttaccgtcggcattacgccgcctgctggcagacagcacctggcagcttgggtcattacgtgccgtagttgctgagtcaagctgttcgcgcagtcaattagcacactcccgctgattcgtggatccacagctcgcaagaatcaccctgcaactgagcaactcagggtcacatccgccatattcaggccagacgtgccgatgatcccctcactatattagcttgcgtggccttgaatgtggaaagtgccagaagtatggatccaacagtcttgtcttaaagctctccgacaaaacgccgacacatacacgtctagacgttccttcttttgactataactaacaacctctcaacagtcatatctaacattattgacacggaacatctggtttggagcctcaggtgtcgaggcactgaccttgcctcggaggcaatgcttcctgcctcaaacatttttagcgagcccgtgcgaatcgctggcggcgatgcctccaagtgctcaaatcgcgttgcagtttcctcatgttgtgtcttcgagctgacgaaggcgtgcccccatctgccatcacagcaacaagctgggcaagcgtcaaacgatcaaacgatggcacattatgtgcaccacaccactttgtccaatatcaattattgtctcactgatttcgtaaccaataattgcgattcaaattgcgcccctcccatcattgcgtttgaagctcgcgcgtccgatacagatcctcctgatcgagcgccatggacctggaggtgggcgcccgcgtggcgttcggcgccggcaagagcggcatcgtgcgcttcgtgggcgagacggacttcgccagcggcgagtgggtgggcatcgagctggagcggcccgagggcaagaacaacggcgagctcaacggccgcgtctacttcacgtgcgcgcccaaccacgggctcttcgtcaagaagtccatggtgcgcgcggtgctgggctcctcttcctccagcgcttcaggcgctgccaaggcgccgctgagccgccggctctctggcgtgggtagcgggacggcgcgccgcctgtcgggcgtgggggcgtcttcgtccatcccggcgccttcctcgaccggcagcagctccgcgagctcgcggctgtcgacgcccaggacgcgcgcgtccatgatcacgcccagcagtcgctcgagcatctctgcggcggcgtccgcggcctctgcttcagcctcgcggctgtcgcttgagcgccgcacgtctgggggctccgccgcgtccgccagcgcctcggtgtcagacgaccagctcgctgacgcgcgcgcgcgaatctcaaagctggaggaggagctggagcagaagaacaggcacgtggagcagctgagacagagcgtgtcggtgatgaaggaggcggcggcggccaacagcgagaagatcaagctgctggaggagcaggggcaggagcaggagaaacagatcgaggagctcgccgctgctggccaggaagagcaggaacaggcacaggtagatgaagacggagacgagaagatggaggaggatgaagtgctggaggagcaggacgccttgtctccgcaggaggagctggcgcagcaggtggagctcatccgagaggaggcggaggagcacgtgcgctccgtgcgcgcggagctggaggaccatattgcggagctgcaggctgagcacgaggagcagctggacgagctgaggctcgagaacgcaacgcaggcgtcggagattaaggcgctggaggcggaggtggcgcagcagaagacgcgcattgccgcgttcacggctgcggagcagaagaaagcggaggaggtcgccatggcggttgccaagtcgagctctggcgcgcgtaaggtggaagcgctggagaagcaactggcagagctccaggatatgatcgagatgatgaccttggagaaggagaccattgagatggataaggaaatcgccgaagagcacgccgaggagctgcagcaggaggtcgagaagttgaaggctgctatggcgctgtcggctactactggatcggattctgaggtatctgcgagcagtggggacttggcagacgagaacagaaagctccgagctgcggtgaagaccttgcacgagcgcgcgtcggaggaaaaggctgatctgagcaagaagctgcgtcaggctcaacgtgagaacgctgaacttgtgtcgctgcgggaagaggttgaagagctggtacgtgatagtgctgcatgtggtgcttgtagaggtactgacgcgaaatatgtgcgctggcggatacttttcgtttacgcagactacgaaaaagaacactctcgaaagcgaagccgaggagctaaaggagatgctggatgtggcgaatgcttacgagtccatggtcgaagatttaaccgagaagaacttgactttgggcgaaaagttggcagagctggagaccacggtgcaatcgctggaatcgttgcgcgaggtggaccaggaaatggaacatcagcataccgagtacgaggctgagctgcgtgcggaaatcgactctcaacggctatcgttgcaggaactgaagcaggctgcattggaccagaaaactgttcttgaggacaaggagcgcacaattgcgcgcttccgcgatcttgcccacagtcaccgcgaagagattgcgcagctgaaggcgaagcttcgtgtggagagtggtgcggtggagtcactgaaggatactgcacacttggcgctgaaccagacgatggggctgcgcgcccttgtagcagctgcacgtgagcacgaaactgaggcagctaaacaaaagatcatcgctgagcaggctagactggagaactcgttcttgcgcgctgtggtgccgaactcgatcttctcagagaccgaccagaaggttcttcgtgtccggttgacgctaggacgcattgcaggcaaatcggacatcttgctgcagcacttgaagaaggatctggataccgtcgtccagcaaccaacgagcagccctcaggagggcgaaaaggatgatggcagcgtctccattgcgggtgtgagcgtggaacagttggtactgggtgataagttggcggcagtctcgtgccaagccaaggaagacctattcatgctggaatgccacctgactacggaggacgaattctcccagggctgctcagcactcgacacctcgcagacgtcggcgttggagagtgtgctggactcggctctgtctgcgttctccgaaggtgctctgttcaatggtgcccgtggtggtggcgatgttgcttcgctgtatgatcgccttgtgcagacctcggatgagtggcatgctggtcgagtcactcaggtttcatcatccgtgggtgctgagagcttcagtgctcgctgcgcagtggtcaagttgcgtgcgcgaaaaaatgtggcgaagatggctttctcgatctctgcaatggtcaccttcttgcgcgcgaccaagaacctcattgctagccccgagatgcctgacgatgcacaaactgcagcgctacggacggacttgcttccggttctggacaaatgtcttggcgagctgctctcagtgctgaatgttgcgcagctattctaccgccgcgcagagatcgatctagctgcctcagatgatgatctggacggtcttgtggctgctggcggcgagaccgtgacttctattcagagctacgccatggaggctcagtcgctagctagtgcgctgcaatcgcagttgtcccaggatggtcttctggagcacgctaaatcagcggaagagttggtgcagttcacgcaacaggctatctatgaccacactgtggcgttcaaggagaagctggctctgctgttcaagttggtgtgtcgtggtgccttcaccgatgctgtggctccacgtactcgcaatgagcatggggatggagctaatggtagaccgcaatggcgcatccgtgcccaggctattcaccaggagctcgtggatgcttcgacgctgcgtagcaatttggctgagatgacagagctgtgcaatgcgctacaccagcgtatccgagagttcgagcgcgcggatagccaacaccgcgtggtggcccagaaactggagagccaagtgctgcagctgacggagagcgtggctgccatgacgagtgagaagtctcagctggaggcgcagcttgcaaaggagcgcgagcagttcgacgttgcgcttgacgagtcgaacaaggagaagacgttgttgaactcgctcaaccgggatcttcgcaagcagctgaaacgctcgagcgacgctggcagcgcggccaaggccggaaatgccagcgctgggggcggcaaggggtcagccatgagcgcagcagacgccgacgcattccgacgcgctttccagcagctccacaacgagctgcacactgtgcgctcgacgcttgcgaaggagcgattggagaagttgctcggatcaagtgccagcgcgagctcccgtgcttcccaggcagcaaaaccttcggatcggttgacgaaatcgctcaaggaggtggcaacgttctcgcgccaggttaaggctcagctgtcgatgccgcgtttggtggatctcaagcgagccgcgtcacctacgggcacttcagcacacgcgcagctcttggctgaaaagctgcagcagtcgcgcgcgcagcgggacctggcagcccttcgtgaacgcgtcggagccgctatgcgcaaggacggttggggccaggacgtcacgaacgctatcactcgcggcgagagcgtgtttggctggcaaccgccggagatggagcggccgcccgtgcttctaggtcgcgtgaagctgggcgacagtggtgccagcaactcgcagtccgtgcagctcgtgttgaaccgctccgaggtcaagcatctatcacaagctttggtgtgctgaatggcccacacgacaaacagtgtaagagaagaagaagcagaggaggaagaattaaggactgctacgtagcgagcgatgcatgtttgagttgaatttgaaggcacttacctacttgacaagagttcggagtcgccccttccatctacgaattagtatctaaggcgagactcgcgcacaatctccgcggacatgggcgtcggattctcctcgactcgccgctgggatggctccaccattacctcacagcagggcaagctggtcatcgtgacaggcgccaactgcggtatcggcttcgagacggccaagactttggcactgcgcggggctcatgtggtgctggcctgtcgagacgaaagccgcggccgccaagcgctggagtccatccgtcgagctctgagccgggaggccagtgatgctgtcggtgaagtggagttgatgctgctggacttggccgaaggcgacagcatccgtgacttcgctcgcgcctttcgagccaagttcgaccatctggacctgctgatcaacaacgcgggggtggcgtgtccgccgcagcgacacaactcgagaggcttggagagcacgttcgccatcaaccacctgggccacttctacctgacgagtttgctgtgggatctgctgcgccggtcgaatccgcaggcgcgagtggtgaatgtctcgagcggtctgcaccatgctgccaagttggacttcgccatgatgggacacaccccgggcaattccatgagcgactacgccgagtccaagatggccaacgtgctgttcacgtacgaactgcagcgacggctgcaagctgcaggcgttgagaacgttttgtccgtggtggtgcaccctggagtttgccacacggagatttggaacaagtacatccgcaccaagctcgcggggtggccattcctgcagtggctggcgaggtgggcgatctggctgctgccgttcctaccgcagaggattggagctttgcccacgctgtacgcagcgaccgtggagagcgtgcgtggcggcgagatctacgcgccggacggatggatgacgctgagaggataccctgcgctggatacgtcacacccggccagccactcgcttgaaaacgccgagaagctttggaagttgagcgaagaattgctggatgccaagtttgaggtgtagggcgattggaatcatgcaacaggaggaccaactcgaagacgccgaatgtgcttgaagtgaagagcgcagctgctgtagtcgtgcaagatgaggttttacatccgattcaattcacctgctggtccgacatgaacaccaggacttgcctgttccatcaactgcatcgtttctgcttggattcgctgacccattttgcaaagacatgacctgggacgatagctttcatccaacggggatgtcattccgctgcagctagcaaatcccccccaagcaagctccaccccagaagcagaagtactcagatcaagagaagaatgggagctggcggaagcacggagaggaactgggacggctcgacgatgtcgtcccagaagggcaagctcgcagtcgtcacgggcgccaactccggtataggcttcgaggcagccaaggcactggcggcgcatggggcgcacgtgattctcgcgtgccgcaatgagggccgcgctcgacgcgccgaagagctgatccgcgaagagctgaccaagctacctagcgatgtcgtggggtcggtcgagttcatgcaggtggacgtgggtgacgccgataccgtccgcgagttcgctcgtgcattccacgacaagttcgaccacctcgacctgctgatcaacaacgccggagtgtcagtgcccgctcagcgccacatgcccaacggactggaggctcactttgctgtcaaccacgtcggccacttctacctgacgagcttgttgctggactcgctgcgtcgctccaagggccaagctcgcgtagtcaacgttagcagtctcgcccactacttcgcctggatgtacctggacttctcgacgctgggccacacccgcggcagccttcgcgactacctgacgtccaagatggccaacctgctcttcacgtacgagttgcagcgtcgcctgcagtccgcacaggttgagaacgtggtggcagtggcggcgcaccctggattgacacacagcgacatctggaaccgctactaccgcagcacgttcccatactggctggctgagctcttcgtgtggctggtgtcgtggctgccgttcatgacgtcgcagatgggcgcgctccccattctgtacgctgcgaccgtgaagagcgtcaagggcggggagtactatggccccaacggcttcctgcacatgcgtggctaccccgctctcgaggcaggcgccaagtccagccactcgctcgagaacgcgagcaagctgtggacgctgagcgaagacacgctcgacgagaagttcaagctgtaaagcgcaacaggagttgaagacgggagcaagcaccacggcatttcatgtgtgacgcgcgcaaaaatagtattgatgaaatgttagatccgccatctgatccacttaattaagacaatagctcttcattatcatccaatcagaggtgtttattgtattttcagccaatcgccgaactgtatattcgaaattcgacgccgtccagtcgacccaagagctccattgcgttgacatctcttcgcagacacctcttcttgctccgctctacgtgcccgccatgaaggtcaagacgatttcccgcgtggagaaggacttcacgcaagaggtgcagtccgacaagctcaaggtcttccgcaactatgacccggccctccacccgttcgagcggccgcgcgagtacacgcgagccctgaacgccgtgaagctcgagcgcttgttcgctaagcccttcatcggcgcgctggacggccactgcgacggagtgacggcgctggccacaaaccccaagagcctggtggcgttcgtgagtggcgcggcggatggagaggtgcgcgtgtgggacctgccgcgccgcaagtgcgtctggaacgtgtatggccaccgcggcttcgtgcgcggcctggcggtgaccccggacggcaacactttctactcgtgcagtgaggacaaaacggtgaagcagtgggcgctgcgcgtcaaggacgaggacgacgacgtgccgacggcgctggccaccttcacgtccaaggagccgttcctgtacgtggagcgactatagcttagaattttttcggtggtgtttgtactgatatgcggatgcttttgcaggggtattgaccaccactggtctcagaatatgttcgccacgtgcggctccaaggtgcaggtgtgggatccttcgcgctcgacgcccacgcacgagttcgcgtggggtgccgactcgatcaactcggtgcacttcaacccggcggaggcttcgctgctggcttctacaggctcggaccgcaacatcacgctgtacgatatccgcatggcgtcttcgatgcgtaaaatcgtcatggagatgcggtccaacgcgctcgcctggaacccaatggagcccatgaacttcacagtcgtaagtgctacgccctcccgaaatggcagcactgtttggtctccgctccaggctcatctgggggtgctaacgccgcttttgcaaccttgatgctttttccaggccaacgaggaccacaacctgtacacgttcgacatgcgcaagatgaaccgcgcgatgatggtgcacaaggaccacgtttcggcagtgtgcgtcattttgactcggctacagtggtcgaacgctgcccaggtgtctaacgtgacgtgcttgttgtcgctgttgctgctgcagaatggacgtggcttactcgcccacgggtcgggagttcgtcgcgggctcgtatgaccgcacgatccgcatcttcaacgtgcgctcggcgaagagccgagaggtttaccacactcagcgcatgcagcggtacgtctcgtttttccggccatcctcaggctcgatgagtcatgcgcatgcaacgccccggcgcctcacggatgacttgagtcgcacccggcgcagtttcgctactcgtgcagcgtggcgtcatcggggccggggcgccctgcgcgcttacgctggtggatcttatccgcttaaccgtcttggaaatttactaaccagtcgtatatcttttttgctttgacaccgtcccacagcatcttctccgtcaagttcagcgccgacgccaacttcgtgctgtcgggtagtgacgacaccaacatccgcatctggaaggctgaagcgtccaagaagctctccaaggtaagcttctgttgcccagttgccctgccgaccagcgagctctggtgtcggttacagctctcgcttttttgcagctttgaagttgctgacgtggcgcgccacgtccaccttcaacggttaccggttctgatatcttctgtgtttgcttggctcgagtagatggccccccgtgagcgccgcaagatggagtacaacgagtcgctcaaggagcgctaccagcacctgcgcgagatcagccgcatctccaagtacgtgtgccgttttgctgctgttattgctgcggttgtcgctgctgttgggcttgttgctcagcggcgaccgcggggatgcacgcagtcccactaacgagtgtcgtgttcgctccttctgctgttaaaccgccacgtgtgaaccgcaggcaccggcacgtgcccaaggccatcaaaaaggcggccgaggccaagcgcgaggccagcgcgcgcgagcagaagaagatggccaaccgccgcgcccacgccaaggagggcgccgtgccgcacaccaacatccgagaaaaggtcgtcgtccgcgaaatggagtagaacgtcggcggaacggaagcctggtggacgcttccgcagcaaccggagctcgctgccccccgcgcaaacggagcgcaggcttcgggacggcgctggccgtgctgccatcgctgctgctggccccatggcgccagcgcgccttctaccttccgttgctaacgcccggaggaacgttcgcggcgcggcgccccggtgtatatacggcaagagtagttgccgaggttgtagtgcgtcaccgcgctcggcggactgccgacggtagccattgcgtaacgaccaacagcggatccgaattgtttgataaccatggcggagcttccactgaagtagctggcgtgcttgcatctctcggcgggcgtgggatccgcccgcttgccgggcccgcggtctgccctgccattgctgctggcgtacctcgtgtcgtggtgggtggacgcgctgtctttagagagcacccatgctcatcgtgggctgagccattccaatgtccgcgctgctgctgctgctgttgctcagcaactcgctgctgctgtacaagccgcgccctgtctgagctgcaatcaaagatgcaggcactccacctcatccttgggctcgtgcggctccccaagttgaagcgctcggcatctttttcgcctgagaagcgcttggccatgccgctgcttggcgaaaaagcagcagaaaacaagcgagcgcgtgcaccaagggcagcgtctctgcgctccatgcaccggcagatccgcgtgcgcgtgctgctccttcgcagattaaaaatcctcttgagctcgctccatgacgagttggctgagctatcgatatcctatcggccggcccatcgatcgcggctcgctcgacccgggcgtcgccactccggagctcggcacgccacagccatagctcggacgcgcggcgaccgcgacgctcggctttgcaaatctccgagttgatgtgtccctttccaacggcgcgaagcaaaaaatctctaaacagaaaacttgacgctgcgttctggtatgttccaagacaagacaagcaaagcaaagcgtaagcgcccctgtaaacgcaggccactgcattgcaagattttctcgctgtttgggacaagctcacccagctggcaaaggcccgagaacagcgagttggggtgaaacgcattcaccacttgggctggccgaaattgacaaaaaagaaggtgtacagtacatcggcaatttcgggaacagagccgggccagcgcagccgagaccgacgtcgccctcctctccctcgaggctcggcaactccgtcgacggtctcacaaccgaaaactccccgcgccccgcagccgcgtgtgtacgtgtaacacgcagcaagcgccgagagagggaaggaggaggttcgagacacacagagacacacaggaagcatgaagcccaaggccgcgcaggacgccgccaagacggcgctggagctggccgagtccagcgagtggggcgcgctcgaccgcctcatctcggcgcagcccgagcgcgccgacgacatggacgacttcggcatgatgccgctgcactgggcctgcacggacacgcacgtgccgctgcgcaccgtcaagaagctcgtggacgtggcccccaacgcgctcagccacaagaacaagggcggcctgctgccgctgcacatcgccgtcaaggccgccaccaagctcgaggtgctgcgcgcgctcgtgcaggccgcgcccgacgtcgccgagtgcctcttcgaggaaacccccacgggcgagacgcccgccgagctcgccagggcctaccagctcacggacgacaaggtcacgttcctcgtcgagatggaggagcagctgcgcgccgcgggcaaggcgcccgaccgcccgagcgccaggttccaggccttcttgaaccaacccggcggcttccccctcccggacgacaccaccagcgtcagcagcttcaggagcctcccctcggccttgggcagcggccgcggaggcgccgcgctggacgacgagtgggccagcaaccggtcggccgtcaacgctgtgagcagcgctctcagactgcccgacggactcgcgggggtgccgctgcccccgcgctggagactggacaagcggtgcaacatctgccagctcaagttcagctacttcaagacgcgtcaccactgtcgctcatgcggcgagtcggtgtgcagtacgcactcgaacaagcgtctgccgctgcaccacttgggcctcaagacgccccagcgcgtgtgcattctctgctacgatgacctgcgcgagaacggcgcgccctctgcggtggtcaacatgtacggccatggacgtcacagcagcttgcccccgatggagcccaacatgatgcgacaggagtctacgccgaatcccaagggcgctggccgaccaccgctgcgctccatcaacagcacagtgtccatgaccaccacatcttccagcagccgcgactcggcgttccagagcccgtcggatactgaccgctacttcaattcgtcttgcaccccgcgcaggatcgtgcgggacacggcagagcgcgacccgacgctgacgacggccttgccgttcgaggacgacccgcgcggacgtcctcgcgcgtggacagatgtggattcgacggagaagtaccaggatatgcaggaacaggtgcgcgagctggagtcgcatgtgcaggagctgaccttggccaagtctcgcattgagaagaagctggaggacgccacccgcctggcggctgaagccaagaaggagcgcgctgcagtggacgcggacgtagcggagctgcgcaacaaccgcatcattgatattaaccgcctctccttggacgacgatgaagacgacgagaaccacaacactggcaacaagaaggaggaggtgcagggacgacagcgtcagtactcggtgcaggtggagaagaagatcgacctgattgaggacagggaggtgaacgtcgccgagacgtgcaactacctgggccaggtcttcctcgaccgcggcgagtacaacagcgctgtggtggagttccgcaagtcggtcgacgcgaaccgcaaggacgtggacgtgtggattaatctggcgcgtgcgcttcacggcgctggtgagttctacgacgctgagattgccatccgacgtgcgttggcgctcacgcccaagaactacgcgtcgctgtcgatgctgggcaagatcctgcactccaagggcgagcacgataaggctgtcgaggtgttccgtgaggcattaagcctgatggaccaggaggacgactcggatgaagacgtgggctcgatgactgttggatggtaaggcgccttcctcacagggcccgggctctccttcttttgagcacccatgaagcacgagagccttcacgcgaccagcacagcgctggaactcacaacaccggacttcagacgttggaaatgccgcacgcgttgttatttagtaagaagacgccgttttccagcccgaggcctcctgtactcaggaggccgacggagaacaaacaagtacagtaggaaacagaaaatacaagcgagttacgagatacacactgcgtcctagccttcaagcggcaacaacatcaatatccgacgccagcgtacttcttcagcttcaccaacaggtcttgatacacgagttcgttggcgttctgggcccaggtgaagtccaggtgcgagaacgcgtcgatggtttgctcgtacacgatagtggcgctgggaagccctgagcggagctgctcaatgtccgtggacgtggcaaacgtgtcggtcgcgccgatgtagaaccctgtgcgagggtagaccatgtctccgatagggaacgcgggcgggtcgaagctgccgtacacggccttgttcttgcagatgagcgacgagcaaaggttgatccccaggagacgcacacagctgcagccgtagtcatacttggcgaaggtgtcgtcccggattccttgcgcgtagtgagccatgttctggaccgacgtgcccgcgggggtctgcgagaggtagacaggaatgcgcgtggcgttcaagttgtccgacggaccggcgataagaccgatggcggagttacagagctcgtcgaggttggtgcatacaacgtcggccagcaacgtctcgagcagctccgtatgaggcaagaagcttgtgaagcccaggttgaggaagacctcgtccaccttgagcttggccagcgtacaaagagcttagcggtggcgtgacccgtccaagctactggagcgagcgctccgaagtagtcgacaacttttgccacctcttgattctccgagaaccccacgaacgcttgtgttgtaccctccgagtggccaatgtagctcaaggtggagcgacccgtggtgtccaagacgtagttgatcatcgccggcaggtcgtagagacccatttcctgccacgaaaactcccagtacgcatcatcgtccgtcgtcagcatcgtgtgctcattcgaccacgtcgtgccgcggttgttgccgagccacacgtcgaagccggcgtcggctaacacgtacgcgagactctggttgcggaagttggagacgaaggtgaagctgctgtccagcagtccgtgctgcagatgaaccgcaggcttgttggcagccgcgtcggagcccgattgactctcggcgtacgtcttggggatccggtacatggtgaggaggtagccgtccgaggtggtcaccttgtgcgtctcgacttcgtagccgcgcgcctcaatgatctcgacgacggtcttgcccacgtacgggtcgacggtggcctcggagacttgttcatccgcgatcacggacggtaaaacgatgaacagcagcccaaggccgagcagtagatggaccaggtctcggaaccgaagtgtcagcatgatgtgcaccagagcaaagcttgtcgaacacactgtcgattgcaagtgagcgtcgtgccggctagagaggaaggcacacggagaggtcggtacgagtcttactaagacggccaaagcctcgacgagtccaacgtgaccggtgccatcagcaagtggtggcgattaggtattgctaggtgcaacgatgaggaagtgcgattgtccgaggcccagcccccgctcacccagccatgtggtcgctctagattccatggcgcgcgattcggcgctcgacgatgcccttagtaagggccccttacacaagtgagagcgacacttaagcactttcaagtcggtcggtcgtctcagcatgaagtagaggatcctaggatcttttcggtcgtttgcaggccggcacagccctcgcttagtcgcatccttgaagttgttgacacgctcgttgaagttgtcattcgtgactaactgcaatggatggcttcacttcgaaccgatctggtccgaagcagatgagggcggctgcagacaagagttggcgtgctggttatccacgtcgagcttggttcacgtccaacaggagttcaacaagcaaatctacacgacagacatggcatcgctgccaagaaaatcgttcgttctctgcttgaagatggccgtcttgactttatgcacaatgcaccagtcctcgatcctgttggtgtaggattttgggcatcatgctcgaaatagtgagcgcgataagaacgtcaagaacgccaaggtgatggcgttgctaatcttgcttgctacattattccagcgaggtcgcgttgcgatctgttagtcaagcatcttccttcgtctaagaagccgcgttcttgctcggtccgagtcatggagtacagtcaatcgaaggtaaacgccgtttgtgttgctgctgttgcgaggttgatgcactgacaggcatgtgcagtatgagggatccatggagttcggacgctaccatggcaagggagtgctacacctgcccgacggctatcgatacgaaggcgagttccagaacggcgagtttcatggtcgaggcacgctcttcttccccgagggaaaactggaaggggaatgggcttgcggaaaggtaggtagaaaattcactgaagtctttgccagcctcattgcagaggctctaacaactttgttcggctatacagcaagtggaagggaccttcacgttctcggacggacttgagtatgccccaacgggctggacgtactgcaccgacgccaaccggcagtactactcggagtcggtatctcctcgaggaatccttccgacaggcgagctcaactacttcgatacgggcgtcaaccgagtagtcccgctaggctcttacgatgccggcaacggcatttacaccccctcgacaggcctcgtgtcggcgtacaataatccatccgagacgcgagtgcccactgagcaggagaaggagtggattgtaaagagagccccaaaagctaccaccaaagacatgtcgatccattgagcacagtacagtagttccacaacgaccaagtatcaagaatatacgattgagatcatggtgattgaagcttccgatacagatgccggagcctcaccgccgcttgttgttcctatcttgtccgctaatgagtggccgtcttgttcaggaagttgtcgaagtctaataaacaatcgcagcaaacacaacgcagccaggtatgcttaatcacccgcacactcgctgtcacagggcagcacctacacaacataccatcatccatagtggtgagagtggagcgaggagacggcaccgaccgaggagcagcagcagcagaacccgacgccctacctccatcgtccaagttcaacgcggctactccgtccgacagcctagccgttcggttcgcgcgaggcggcgagtcgaaggtcatcatgtcgttcgtcttggtcttgctgcactcctccagcgtcttcattaaattatcgttcacctgctcacagcaaaaaaaaaaaaaatatatatatcggcacccttcacccacactatacaactccagcgccacgtacagtgaggcactcctcgagcgtgcgttcgtcgatcttgcccatgacgcctccttcaatgagcgtgttcattctgggctggcactggcgcaagaagtccagcacgtcttccagctgctctccagtctgtcctttcgtgtgcagctccctcagcagcttaatcttctcctgcaccaccttcaagtccgcgtgcagcttctccagctgctgctccctcgtgcgtctcggcgccgcagccgcgaaaccagcagagctctcctccctagaggcagcagtcgtggaggacggcggcgtgaagatgggtacatcgttctccacctccgggaaggccacgccctgcagcttgagctgcctgtacacgtcctggaacgcgtgcagctcgccgcccatgaaggcgtcggcccactggcggatcagcagcagcgcttggttctgcacgtccacgcccaggctgccgtccgagagcgccgccacctcgttcaggaacagccgcgagcccacgaggctgtgcacggcggccggcccgttcttcaccagcgtctcggtcagcaccagcgccagcagcgccaccttgggctgcccgctctgcaggcggcgctgcagcaggcgcacgatgtcgtcgcacgcggcgtgctgcgcgttggcgcagtcgcacagcgccatattcagagcccactcggggcccgccagcgtctcatccgtcgcgcgcagcaccaggtcctccgcctccgtcgagtactcggccatcgtccgttaaatgcgccaagcttttcttcaaattgatcctgcgagccaaaagttaaggattgctccaggtttagtaactgtacagatttgatactgtattcagaatgtaaacacacacaaaatgcgcaaattggtattaattgggttcgccacttgaagccaacacgcaaacgttgacgaagcggagctatgctgccgtcgcgcgtgctgtacggggccgtggccatgtcggcgggcgtgttcgtgttctcgttcctgcaggagcgcgaggagcgggaggaccaggagctcgagtcggcggagcggcccgtgacgtccgagctcttcttccaggccatggagcagatgccgcagctgtcggcccagcagcggctcgagatgcggcgcttctggcgcaacctcacgcgcaagcagcagcagcggcgactcagcgtcggcagcagcgacagcctcgacgcggacgcggagccgcgccgcgagctcgtggtcagggacgtgcagctcttcgcgcaggagtacaagcgcgtgttccccgacattttcccggagcagcaggtgctggacgccgcggagcgagccgctgacgcggcggagcagctgcccaccgcctggagcggcatcgtgggcagtaccagcaccatgatcaagtccacgggcaagagactcaaccacatcgccaaggacaccaaggacgaggtgcagttcgccatgcaccgcacagtgaggaaagtgctggagagcgcgctggatatcgtcgccgccaggctcaagcagacgctgaaggacccagacatgccgagctatttgaagacgaacattgacatcggcatcgagcagttcatgccagatgtcaagatggagattttccgcaagacgcgcgagctgtttggccaggattcgcctacgagtgcattagagaaagctgcgaaggccggcggaaggagcagcggaggtggcagcgccccacccagcggacgaggagatgtcgtcccagtgaccaagagaaggtttggaccctttcgtcgtctccgcggacatattttgtatcacttgttcccgtgtgataagacgatttggaaatccttcaaggatccgtggtgggttttgtatacgggcgtgggtcttttgccggtggtggggcagctgtggtggatcttcatgtttatcatcaaggacaagacgaacgagcaccaattgtgccagtttattgtgagtttcaaggcggcgcagttaattacgctgggaatcatgcacatgatgtttgggatcttcatgtacacgaagtgtatcgtgcagggctcgatgctggcgtgccaaaatggaggcggccctgcgctcagtgacggtaccgcgtgcttcttcgtgcttcagatcgtcctcgtctgggcggcgttcttccgactgccgtacactgtgcggccacaagagttgtatcgtacgaagtctatggagctgcgagaacggcgcgtgtttcacgatgctttcggcaacgaagtgcatttaaatcgtggtggctacctcatgaagttctgcggatatgagacggtatctttcaccgtgatcatggctctcgcgagtcttgtactatggcttccgttcgagtcgtggcagcgtcaagcgttgttctactggatccgcactgcgtacggcttgttttcgttcccattcctggtgttcaaaattccagtactggctaatgtgctgatgcacacgcgccaaatgggctacgacgagcaaggcgatacggtcaggtttgctgtcaagaagcggcacgaatgagagagccccacactcactgaatcggaagactatgaacgtattttggattaataaacgtatcttggtgacgagtatacagacgtgccgagcgacggaatgtgccagcgcattccatcgcccctcgagtccagtaaatgactggatctgttggtcggtcgctattgaaactagatagatgtggctgctcgcggtgggtaaacgcacactacaccagctcctccgccttagaagcagcaaccgagccctgtcgagattcaaacgagtcgtctttgagccggttgttgcgcagcaacgcgtgcgccgcactagccagcgatctgcgggtacgtgcaccaattcacgtcagatatgacaaaaggatgttaaacgcaagatgcgagcgcctagcaatagcaacgccacaagcatactcacgacacggataacgcgaagataaccgacggcagaacgaagaagagcaggaacaccatcgtcgctgcaaaggatccacataacacaaggcaccgtcagcaccagatccacaaactacacacctgcaactaccaacgtacatcctgtcgccgcgagcagaatgtcctgctcactcagtcgccgcccaaagacctcgaacttgtcggtcgggatctccttcttggtgagaaacacgtgccacccgtagcccaccacgatgcacaccagcagctgaatcggatggaagaacatcctgcagcagcatcaaccgccagttaacaccaagtcagaacaggattgccatcgcaattgcaatggagatggcagccaccaatacactcacagcaggaaggcgaagacgccgacggtgagcagcaggtagttggtcaggaagtagttggcgttggtcttcatgcgcgccagcatgcggtgctgcggcggcaggttgaacggctccgtctcgccgacgcccgcgcagctgaagagcgagcgcattgacgcgatggtcacgcgctgctgcagcgtgtcgagcaggaactgaaccacgtctcggtctcctttgctcttgctgctgctgctgctgcactcgacgtccactttgcgcactcgaggcgaggacggcggcgacatgtgcgcgtgcgcgttgctgctgttgagcattggcggcatctcggggagcagagggaggagaactgggagcgatgaatgatgaatggcggccgcctcgagtgatgaagcgagcagctccgatgatcaccctcgcggtccgccgcgcccgtctgcgtgcaacgttgagcgactggaatattcgatatcgcatcggtttagagagatcagagtatggtctaagccaatgaaagggcgttatcgctctctgaatcgcgatggtagcgtttcaatgtaacgacgtgacacgaaggggaacatctgcgctcctcaagcgcaagcgatcggttcggcgtggcgatttgtctcgctcccgcttccctccctcgctctctgcgcaatggcaagagggaggtgcttgctgttggcaacgagactcgtgcacacgcgcgtgtaggctgccaccggggcttttggtgcaatttttggttctagacgcgactggcaaaaccgtttgaagagtaacggtttccatcaccgaaagcgcgagtctccattatatcccgagacctttatgcaacagggctacagcacgatggcagcactgcactgcctcgaatgaaattcaagctgaagggatggccggtcgcagccgctggcgtaagcttactcactcactcgagtttgagtgagggctctgctgctttacaacgcgacgatcgggcgtaatgcacaacttcaacaatcgcgctacgttggacttgttggcgttgagcacgaccatcaacaggtattttcgggcgtggaagagcacaacactacgtagctcccaaggttattctcggtggatcccgtgcccgtagctgacctattggcggcctataaggtcaatttggccgaggtcactcgctgcgtggcttgtggagtgcgtgcggagcgtttcagcggactctttggcggatgcatgtcaagatcttatccgctcgacggaggcatcagcgagctcgggtccattccagcttttcttgctcaactcgcacgtgatggctgagctccccactcgtcaatcggccgcgcgaagtctgccgactgcggcgtctctattctcaaccagctcgcagggcgtcgaatgggaggacaagctgaattccgtggacaaggatgcactggctgccggcaagacgccatcagtgtggaggcctggagaaaaagaggacgcagacaacaaccaagacagcgacgatccccacgaaggtggcgaggatgttcaagattcggagatttcgccttctcgtcgtgaggatcgcagtgaattgcagcagctccgcaacgagaaccagacgttggtgcagcgcttggcgctgatggaaacgcagcacgcccagtacattgacgacctggagaagaagctgcagcatgcgatcaggacccacaaagagatggagcagaagctccagctgcagctggagactgtccagcaagagcagcaagccgcagtggagaacgctcgcaaggtgagcaccattttgacccgcgtctccagctggatgcggcaagtgcagcgatcggcccaagccgagcgtcattcacgccatgtagtcaaatctgtgagtcgggacctggagctgacggtgacaccacgaagcgactcgccgtacacactctggaccacaggagcgagcctcgcgacaaacgttccggaatgccacgagtcgccgacagctacaaacaaactcgacttggacgataattcactgcgatccgattgttacgaagtgcagatcgacggagtgagtgaaccgcgacaagctacgctccctccccccgctcctggacggaaccgctccaaaaggtcaagtttaccggggaaaggtttccactacgtcgggtacaccatcccgtcgccatgcacccgaccagctgaagtcgtgctaaagcccgtgggtgggaatgagatcgtactcgacggcttgccgtcggtcaactgcaaacctcataacgacacaccagtgcccaagcgaagtcccggtgctctgtttgcctactgtgcacaagtggtcacaacctcgttggcgggtgtacgctcctctccagaaccgcgagtgaaagtcacaccggcgtggaaaggggatcgcttgccgtctgtgctcgaaggcgacgaagaaaccggtcagtgcagtaaccgagcatccagtcagcgtccgagtgtagcgcttccaagcctttcgatcggactgctctagattgtatttatgctatctcgattcatgtattcatgtaagaaaatatagcttaactaaaaagcagactgaaaacgcatagatgtgcattaaagatttacgcctgaaggggaataggacctggttcgacgcactcaacttcgttacgctatcgttcactgcgaaccttcgccaagtcggccttcagtgcttcgttggttgggtccagctcgacacttgctgcgtagtcttgttcagctgtcgggtcgacaaacaagtaaaacaaaccgattaggctggatttgataacaagttatagatcacaacgtacctcgttctaagtcacgaagcgacaagtaagcggcgccacgtcggacaagcgttttcaccacccaagcccgtcgctgggctgacccggcggctgggccaatcgagaagaaggcaagtccgtggtcttgcccggaagcaccaactgttgtcgtgtcttgctgcagaagctccagagctcgtgtgcagtcgtggacgcattcctttgcagaatgctgcatcaggtagcacgcggctcggttcgacaagcaagcgatcgataatgggttcagctgcagcgactccgagtacttttgaaccgcttggtcgagatccttgccctgtcggaagatttcgtcgccggctatcttcaattcgtgtgccttttccatcgcgacgagctccataaagtcgtctcgaagctgcgggttctggttgtccatggagcaggccacgccgtagtcagctttcgcttggctgtagtggccaacgcgacagtaggcggtacctcgccgaacgaacagctttagcttcaggcggtagtgcttcaataaactcgagctgttgtccgtatcgcgggtatcggggagatacgacagagccttcgagcagtctgaaatgcattcctataacaactgggatcagcactagagtagaatgaagtcataagcgcaatatacaatattgtacctcgaactcgccgagttgaagcaggcaagcggctcgattcgacagacaagtagcaatcaggtccgtattatcactgggcgttgcagaaatggcttcggcatacgcattcgtagcactgcggaagtccttggaatggaagaagtcgtcacctttagccttcaaccaaatagctatcgatcgtcaacagcacaatataaacagaaatgttagtgcactcactcggcaagcatctcgttgtatgagcttcgtgacgtacgatccgtttcgctgatgtcgtattccgaggtgcggttgagtccctggtgtttgttgatgtgcttgcggttcttcagcagccagtcctcttcttcggcagccttggattctcgagaaggtgtcgggaagactctaggagtaaagcggatttctgactttacgcattcccggggaggaggaagctcgaccgcttctccagcagaatcgctgtcattttcgactttgatggcttcatcacgagagacttcgacccaatcacttggctcggcgacttcggctgtagcagcactagactgtgactcgacatcaactgcaggcttcgcagcacttgaaacgtcaaagctgccatcttcagtcagttcaatgacctcgtcttcttgattgtccctcgattcgggtgagctgtcgtgcggaggtgatgcaaaagacaccttcttcttcgtcttctgagcagataacgaggggctttcgcgcttaggtgaagtgctattctcctgggtatgagcgtcctgattgctcgcttccttcttcttccgttcctgctcctggatctgcagatctcgaaacgactcgtacaaactccgctatcgaaacggcaatgcaatatgactgtcagtgcaacatccccaacagccagtacgttcatcagacccggtacctcttcgcgctctttttcctccgctttgaggtcggtcaggatctgacgattggtgtcgtcgactgccatttgcgcgcgtaaagtctccttctcctcctggtacttccgctccttcctcttctcgctcaacgcagtttcactcgctcgtttccgctccattgacgcctctcgccgttcttttagagcggctttggtgtcttggtattgcagctgcttccacagtcggttctccttcttcgtcaacgagatccgaagtaaattcgacgccgggatgctctttacaacagcagacgcatcgtccaccgcgtcctgcaggtctagcaacagcacgtagggcgccgcattgaccttcaccaccagatcgctcactagagatcaccaatacgaacgtcagccagcatcctcgatggattggggatgaagttgagcttggatcgctcgatcgtaccgtaaatgtcggtgctgcgcaacgctgtcccgggcagatgcagctccagcgcgaggctggacgcgtcttcttcccacgtgtatcgaggcaccagcggcatcctatcttgtcttgtcctgcttggcaaatgactcagtggagtaggtatctttcaccgcgtccgctcacggtctcttgcggcggttcaagatcgtggaaaacgggtacttaagtagggtgttgaagcgaccgggcgattgacatgcatgcttcgtgctggttccttccctgtaccaacgtcaacgcagcgactgcttcccgcatcacgatgactttcaagcttactcgccaaagatggaagcgcccgcaccattatgactggcagcgttgaagcacatcctgcctgattcttaatcgagttggctgagaactgcttcgtgcttgcttgtctgcgctgaccacactgacgttagtcggctcggtcaccaagatgtacggcagtgtgaactgcgatagctaccgtaccgacatggtcgtagtcattgaaatcgtccagcactaactgtactgttgaggcaatgcacgtacgagcgcttgcaatgtgaacagctccgcgctaacgtacaccgagcctttgattcacactgcaagcgctccatcatggagtgcatgtgctgtatggctgcagtggcagcgcttcaacctgcgccgccgaaactgggccacgacgtcgttttctgctcataagtcacgcgtgctgcaaaacgaagtgttgaacaaacgcaggaccagaccgcctgaagcctcgagcagctgacaggtatccaaacgcctggaaacctgcgtgccaccaggtggacgcgaccaagtgatttgccctcgtgcatcaaaacgagagaccgactgtgatggcgtcccccgtccatccataacgcaattcgatccgctcctgccacttggaccgtcatggcgatcccccgcagcttggcgctattgctgctggctttgaccaccatactcctgaccatgacgaagcccgcgcgtgccatcgctgaggcgtacgtcgaccctgacgatggattgaccgtcatgcagatcgtcgaggcccgcggctactacgtcgaggagcacaaggtcacgacctcggacaactacatcctgaccatgtaccgactgcccaagacgtacacggagagccgactgaacgcttctgctgcggccgacaagccggccgtgtacctcatccatggcctgctggacagcagcttcacgtacgtgtgcaacttccgcaaccagagcttggccttcttgctcgcggacgcgggctacgacgtctggctgggcaacaaccgaggcacgacgtggtccaaccagcacgtcacgtacacgaccgatgacgacgagtactgggccttctcgtggcaggagatggcgctgtacgacatgcccgccatggtcaactacgtgctggacacgacgggccactccacgctgagctacgtgggtcactcggaggggaccatgcaggcgttcgccggcttctccgtcgaccaagagctggccaagaaagtctcgtacttcggcgctcttgctcctgttgcctacgtgggccacatcacttcgcccatcttcgagctcatggccgacacgtacttggacgtgttgttcacgatcctcggcgtcggggcgttctgggaaaccaactggctgatccagggcatccttgccaagtacgcgtgcgccttcgtggaccaggcctgtgactcgatcatcaacgcactcacggggccttcggacaacgtcaacaccacgcggttgcaggtgtacatctcccagactccagccggcacctccgtcaagaacatggcgcacttcgcacaaggaattcgggacaacacgttccgttactacgactacgggtgtagttgcgtccaagctctgggtatcaatctgtgctccaagctcatctgcaagaacaaggcggtgtatggagcgttcgagccgccctcgttcgacctcgggaccatcaagtacccccgcatgggcttctacactgggagcgacgactggctggctaccagcacggacatctcgcaactgcgcgctaagctcacgagcgcggacatcgtcaccgaccaaagcgtcgagtacaaccacttggacttcacgtggggctacaacgccaacgagctcatctaccaagacctgctcacccagatcggcaagtacgttgatgtcggatactgaaagtgagtccaagaacttcaattcaacgtcgttgtcattgtgaatactaagtgaagttttgtattatcgttcagcgtttgatcgttcaagtcatcctgcttcgttctgttgcaactagctcactacatgtggttgtacggtgggagggtgtcgcgagagccaaaactgcagcttccgggtgtgtagcttccggttcgagtcgccatttgagcaatcgcgcagcatgggcagcaacaggcttcacagtagtctccgcagcaattccccgggatgcggaacctctgtcgtgtgacagagcgcaggtggcagatccagagcggcaagcacgccgacaagaagcacccgaagaggaagctcaggaacagcccgcagcagtaggagctgacgcccaggcgcttggagatctgcgccagcgagatgcaggggcaaaacgtcaccatgcagcagttcgggatcaagtccgtacagcaaccgcagaggccgaccaaccaactccccatcatgggcggcgtgtcgtcggaaaagggcacgacgctggcatattgctgggctccgcttccaccgtacgcttgtccttgctggtcggacacccaaccaccttcgaggtcagcggggatagctcctggtgtcacgtctgctacttggttcgctttcatgttttgtcggtggagtgatttgcttgtcccgagcgcaggtgagcggagaaagtgagtcgatgaatgcaaccacgtgctcttttgcgtctattttccggctagacaatgcacacaagtatttttacagcatgggaagtgcttcgtgcatttctcacagacttaactgcttgctgccaacctcaaaatcgacggacaaaataaaagaatggagctagaggccataatgcttttcaccaacggatactaaactcgatgcatgtagtaaagcagttaagcgatatttacgatctttcttgaccacaccttcgtgacaagcttaacgtaagcggtgaggttacaggagacgacatacctaatctagttggcgaaaagaaaacgaggtcctggcttccgctccgacgctggcggagccagaggagccatccaaggagttgcttaagctcgatgcgccggcatctcctgtgtaccccactccctggtacttcttgagctgcttcagcaggtcctggtacattttctcgttcgcgttatatgcccacgtcaggtccaggtggctgtattccttgactgcacgttcgtgcatgatcgttccggacggaagcgccttgcggagctgctcgatgtctgtcgccgtggcgatggtgtccgccgatccaatatagaaaccagtgcgggggtacaccatcttgccgatcgggaaggcgggcgggtcgaagctgccgtacacctttttgtttttgcacttggactccttgcactcgtcaatatccgagtcccggtcgcacttacagccgtagtcgtaggatgcgaacgtgttgtcacgaatgctctgcgcatagtgcgccatgttcttcacggatgtacccgccggcgtctgtgaaatgtacacgggtatccgtgatgtgttggtactgacggatgggccggcgacgagagagatcgtggtgctgcacagcttctccgccagtgtacacgcgtatccgccgataatttcctgaatgaacgtgcttttggaggagaattccgcaatcccgaacgcttgataccatgcaccttggccatagtcttgaacacgcccgctgtgaggtgaccagtccaagccacgggggcgagcgctgcgaagtacgacacctttttcgcgagctcctggtcagtggagaagcccacaaacgcctgtgtggttccctcagagtgtccgacatagcttagagttgagcttcgcgtcctgttgagcacgtagttgatttccgccgggaggtcgtacttgcccatgtcttcccacgagaactcccagaactcgtcgtcgtcgtccgtatatgtcaaatgctccctggaccacgtcgtgccgcggttgttgccgagccagacgtcgtagagtaagcgatctgcccttctgcagctaccgtccgcaccttgtccgagtccgcggctctgcagcgccggggtcctcggcggctagcaacgccaattcgtcacctatacaaatatacaccgctccacgcgatatccaacacgcacaacgccttgtacgtcgccaatcccaggtgctcgcacgtgatcctcgacccctccgcttcttatcgggcccaggtaggcgatagctgactggagctgtccctctgtgaactgtgcccacgtgcgcgcacaactcgcgggttctcccttccggcggatgtgtccgcggggtactggtcgtcgatggacgcacgtgtgcaccgtgactctgtgtgcacgctgctcgtcacctcggaccgggctcttcacttcgacttcactttgaccttagtcgacttgctacggccaactgcttcgtgtattgacgttacactctgcttggctctactgtatgggttgatctgtaccctacagcgctatttcgatactgactacacttttactgccatcacttggtggcgtgggcgccatgggtgccggccaacggcttgcacaccttggctaatcgtcggtcttggtcgttgccttgggtgaggtggcacgtcggtgagtttccagcgttacctcgctccccttgtgtgctatcctcgatgtcatgctctcttcgactcttcctccgcttgttcaccccgtcgccgccgccgtcttgactgctgctcgctatgtttcgccgccgcttcggatatctttaccagtacttgcgtaccctctttgcgtcgtccgtcctcgatcctgttcctgttgtagtccttgctgctgggtcgtctctccttgaagctctgttggtccttggaagcatcctggcactcagagccttggctacagttgctgcgcgtcgctcgttgcattttgacgatggtcatcacgtacactagctgcttcgtgcacgtgactggtactcgctaatagccttctcagcgcagcgccactagaaatcgactcggtgcttactgtagcctgcgtcagcgagtaggaaggccaagctctgcttgcggaagttgcacacgaaggtgagctgtcaaggagaccgtgctgcagcagcacgacgggcttcttggcagaaactttagccttggattggctcttagcgtacgtctttggcaatcggtacatggtgaggatgtagtcatctgcagtggtcactttgtgcgtctcgactgagtatccgcgcgcctcgacgatttccacgacgtccctgcccacgtcatcgtccacgtccacctcggcgacttcagctgcttccacttctccagcgacaccaacgcagccgatggcgaacaggagcacgaggctccagaggccccaagcgagaagagatcctcgcgaagacaacatgaccggccctccttgactgttgagctgtcggagaaaattgcgaagtgagagtgagcgaccgtcacgagcagcgcgatgtcatggctacagaggggccgagtggttgaaccagtcgcgttaattaatcagggctgcagatccggtaatttatctttacggcaaccgtatggatctgcagagaccgcgactggcactgtcaatccgccgcggattccgacggattctgcagcaaagaagccgaggatgacaaggcatcttctccatttgacgcaatatcttagtgacgaacctgcctttgcgaccgacgggctcttggtcctggcaacaagtcatggcccctgtgcattgacagtgagcgcttccactttcgtaatgaagcgcgggaaaaaaggcaactttcggcaccttaccagactcagatgttccagatcagaattgagctcgcatcagaaatagtccctccagcttacacaaatattttcagccaatcacacccagatcaccgctcgccatacaaacttcaccaaaccgagctcaagcgaccatggcggagaccgaatggcagctcatcagccagggcgccgaggcggttcgtgccctgcctgcacaccacaactacatatcaatgccagcgtctagctgattattttgcttcaatcaacagaaagtgttcgagacggacttcgccggccgcccctgcatcgtcaaggagcgcatcaagaagagctaccgcctgtcggtgctggacaagaagctgtcgcaccgccgcctggtgcaggaagctcgctgcatcctcaagtgccgccgcgctggggtcctcacgcccgccattttcctcgtggacgaggacaagagccgcctctacctggaaaaagtgcaaggcggcagcctcaaggactatttgcgacgagcctacaagctcggtacgaacgaagcgctgcaatgggcaggaattgggagtgctttgaagacttatggtggggtgtcgttgatttggagcagaccccaagtatggcccgatggccttgaagaaggcctaccagatcggcgcagccatcgccaagatgcacgacgcggacatcgtccacggagacctgaccacgtccaacatgatgctgagcagcgacgacgctacggatgtggtaggtgtcgagtgggcagaattgtgagagggtgggtgtctttgctaatatattatatgtggcgtgatgcagacgatgatcgactttggtctggccaactcgcagccgctgccggaggacaaggctgtggacctttacgtcatggagcgagcatttgccagcacccacgtgaactcagagctactggtatgtgcttgctggctcgtcgcttgagtgagatgcgtactgataacttggtgctataggttgaagaggtgctgcgtgcataccgagcgaaatcccgtcgctctgatgcgatcttccagaagctctcgcaagtccgtctgcgtggccggaagcgtactatggtcggataaacagactgctcatgttgctgtaagggaatgcgtcatgtatacaacagatacgggcgttaatcgcttcaatgcagcaatctcggctgcttcgactttcccagccttttgtcgttcgcaacttttacctcgaggttgcagccgtcggctccacggccattgatgaggtgtctgcatgaggctgacgaagcctataatactttaaaaaaaacaaagactgttctgcaacagaagtctgtatttactacacctcccgtaattgccctaaggtttgctaccccagccagctttatttgctggaccactcactatttcttacaaactactttacccaggagtggttagtttttttgcttcttagctgtaataatcaacagaacaatgtcagatacacgtacagtacgcagcgaacaagacaatcaacggcacatacctggtgggccgtcttcctcctcctcgttgtcctcctcttcatcaccggcagctccatcatcgtcacctccgtttgcgtcgtcggcagtctcattgttctcgacatcatcatcgccgtcgccattgtcctcgtcgtcggcagtgacctgctccccatcatcctcatcctccgcggcggcgccagcatcgtcctcttcctcctcctcttcttcctcctcgtcatcatcctcatcctgagctgctgcgtccaccttgaagtcctcgtcgttctcgtcgtcctcaaagttcgtgtagaggtacgacagcccgacttcctcctcctcctcctctccatcatccccatcgtcttcctcctcatcgtcgtcatcatcatcgttctcctgcttcgctgcgtcgtcctccgtctcctccaccgagtcttccttctcgtcgtcagcgccagcactctcctcgtcgctcttggcgacgctgtcctcttcctccgcgtcatcgggggctcggttcgtttcgtctgccgggtccttggcactcacaggcttctccgcattgtccttgggcttggtagtcgtcacctatcgagcaaccaagatcacgacacttgaagttagtatccaatcagcaactgtatcatctctcttccagcgcccccgaccgcaacaacctcgcagagttcggaagtaaaagatgtggcgacagacgtaccgccatgttgagttggtgatactgctggatggggggggatctggcgagtaggtgggcgagaaccgtgccgggtcaaagctggtggaagcccttgaaagcgtggttttccgaatcttgcgctgtgtggactacatcactttttgtgtctgggcatgagctcagcaatgctcagctcagtgggcatggaggggtcttacccgtgtgactgcggtgcacacagggctttgtttttggtgctcgacgcaagcggccccctcactccatcgagatcccatgtcggggcgcacgtgccagcccacagcgctacttcaccgagatcgacaggatagcggccgtgtcgttgtgtgccaaaccagtctccgcgactcacaaagtggatggcggaagatcagtatgaaagtcacggtgctgggatcgaggattcgttacagcgagagctccttgcacgcaaatgttgggtctgcggtgccgctgcggacagtgccgctactagcggcccgctaggacttcctatgggcatcctcgaagcatatactagcttaccctcgctgtgtcttggccatcacattgtgattcacaagactcttgtgatggccgtgctgcagctcgaactgcgcgcggtgtatgtactcgatgactactgcaatggcggatgggcgctgccgccgttgacaggcctcgggtcaatgtcctatagacagactcggcagtgtgggatggttctcgtcaagcggggtcggtgctcggtctccgatagacggagcgtcgagtcggagcaccatacattttcagcagcggcgacaaaatccatcgggcgcagcgaaatggacacgcctgagatcgatcgatcgggcactcggcattgggcatgtgcccaaaatgcccagctggcgcaaggatcaatgggagcgccacgcgctgagaaaggcgagtccaacgcgatcggcgatgcctttcaaaggctctcccggggtagaggagcccggcgcatttcagtgctcattccccaatttgccagtagaacggcagattcctccagctccctgacagaggacttgacacaccgtagacactagacagactgacacctcacagcatgcagctcacaggcgttcgcggccgtggcggcgctgacgtcgtccgccagcctgctggccagcgcgtacacgaacccgatcgtgatcaagaactacaagatgttcgactcgaacacgggcgactacttcgccgtcaagggcgtggactactacccgcggcccaactcgggcgagctcaacgtcaacaactacgacttcttcacggacgacgacagctccatctggaaggacgacatcgcgtacctggctgaggcgggcgccaacgccgtgcggctgtacgccgtggatccgtccaagtcgcacgacgacttcatgtgcgagctgcgcaagtacggcatgtacgcgctcgtggacctgggcgccacgtgcgagaactgctccagcacggtggacgagtacccggcgtgctacccgggcgcgctcaagacgcgcggccagcagatcatcaccgagttcgcgcagtatgacaacacgctgggcttcagcgccggcaacgagatcaacaacctcgtggacgacgccgccaccaacgccctgtgccagaagaagttcatccgagacatgcgcgccttcatcggcggctgctcgtccaccatgcgcagtatccccgtgggcgtcgtgatggccgacccggacacgaccaacaacaaccgccagctcaacgcgcagtactacaactgccgcacggactcgagcgacaagtacgagaacgccgagtggtacggcctcaacacgtaccagtactgcgacggagacgtgacgacgctggccgacgccgacggcttctcggagctattgacagacttcaccaactacagcatgtccatcccggtcatgcagaccgagtacggctgcgtaaaccgagcttccccacggtgggcgactacgaggcgcagcgcacgtggcgtcaggccggctggctgctgggcgacgacttcagcaaggtcttctcgggcggcttcgccgtcgagtactcgaccgagatggccaactcggacggctcgggctcatccgcttcagcgtatccgttcacgtcgtacggcgcgcagaactacgggctgggctactactcgcccgaggactgcgactggatcaacaccatgtgctcgtacaaccccatatccaacttctacaacctttctacgcagtacaacgactcggacttctcgtccgagtcctcgtacgatgacttcacggccgactcggaccgcgccagccccccggactgcccctcgggcttctcggccctcgccgactcgacgtgggagtcggacagcgtggaggacgagtcgtgcccgtccgaggtgctcaactacgagtgctcgggccagacggccagcgactggaccacaccacgtcgagcgcggccagcggcggcaccgccgagagcagcggcgactcgtcagatgcttcggctgtcagcgtgtccatggcctcggtgcttctgctgggctctgtgatcgctacgctgctctaggaagcgggtgtcctacttaagtgtcggtgggtggtagaaggagacgtaacacgcagcaagtgctggtcggcgacagatagccgctagagcaaagataatgaacaagctgcaaagagattgtattctaagcgtacgagagcattgtggggcttcatgtgacgcaatgtcgagctgtcatgtcggcgaatgtactgtgctcgttgaagtgaactgtaatctttaccagccgcattaacttttgctcgatcgaccagacgacagtgagtaacgttgcgttgtgccctctcttggttgcacttgaggtgctccctgctctttcttcagcgcaccaccaagctctccgtgtttgccaccgacagaagcggttggtcaacaggcagtgagcatgaatggctcggactcgatgaacatctctacatgtacaccagcaaaggcttgctcgacaagcaacagcaagcgcgtatccacaatagcgggcgtgtccgcgctgaagtgtccaagggtcacagttgagagatatcaggggcatacaaatccccttgttgcgaagggagcgtctgacttgatgggggcacttgccgtcggacggccaccatcaggtcacattggacaagagacgctgaactcgtcttacttggcgtttgtatgcgctggatttgttgcacccaaagtcacaccacaccacaccgctcattcgaacacttcgagtcattcaccactcctcaattcgcctgccgcccctcacgtcgccctgcaatccgactagccatgcagcgcattgcagccgttgcaatggcaatcgccgccgctgcggtcgtgccaacggcgcagagctacacgaaccccatcaccgtcaagggctacaagatgttcgacgccaagacgggggacgccttcgccgtcaagggcatcgactactacccgcgccccaacacgggggacctggacgccaacaacctcgacttcttcacggacgacaacgaggacatctggcgcccggacatcgagtacctcgcggccgtgggcgccaacgccgtgcgactgtacgccgtggacccgtccaagtcgcacgacctcttcatgtgcgcgctgcgagccaagggcatgtacgcgctggtggatcttggcgccagctgcgagaactgctccatcacggtggacgagtacccggcgtgctatccgggcgcgctcaagactcggggggagcagatcatctccgagttcgcccagtacgacaacgtattggcgttcagcgccggcaacgaggtgaataacattgtggacgacgcgtggaccaacgccccctgccagaagaagttcattcgggatatgcgggcgttcctcggaggctgctcgagcttccgggacatccccgtgggggtggtcatggccgacccggacactaccaacaacaaccgagaggtgaactccaagtactacaactgcaggacggactcgagcgacgagtacgagaacgcggaatggtacggactcaatacgtatcagtactgcaatgcgaaggttacggagctggcgtcgtccgggggattcgagaagctattgacggacttctcgtcctatgacttgactatccccgtcctgctcacggagttcggctgcgtgaacccgagcttcccgactgtggacgggtatgaggcgcaacgcacgtggctgcaggctggctggctgttcgactcgacgttccgtgacgtgtttgccggcggattcgcgttcgagtactcgacggagaacgctaatgccaaggacgagtcgccctacccgttcacgagctacggagctcagaactatggactgggctacttctcgcccgaggactgcgaccacgagtcggtcccgtgtgtgtacaacccgatgccgaacttcgacagcctcgcggagcagtacaacgctacggatgtgtcgggtgagagcaacaaggacgacttcacgcccgaccgaactactctcccttcgtgccccgatggattccccgcactggccgatgctacgtgggaggcggacagcattgacagtctgacgtgtccgtctactgcccagcagtatgagtgccccgaccaggaaccgagtggggattgggccagtgatgcgggatccagttccacgacgtcgtcatcgaagacttctaagaattccgacactaatgccggaagttccaccactgcgacatcaggaacgggtacgacggacgatggaggcaacacgagctcttcgtcctcgactttgaccctatccgttgcgatggctgcctctgtggcggcgcttgcaagtattcttgtctaataaatcagaccgaagttgtttgataaatatattcgaagtgaaaatagttgttgaagtgagcgttgataagattgaatcggactgtgtatgcgaccagagagaccttatcaaatgtattcacgtcttggaattttcctcgttcattgttgataagcgatccgaccacgcaagcgaagacaccaccaaatccatcgagtatgaacctcaccgcaactctcgcagcgttggttgctgccctcgccgtctcgaatgtggagggctacacgaacccgatcaagatcaagggctaccgcatgttcgacgccgggacgggtgaccccgtagcgatcaaaggcatcgactactacccccgtccgaatgctggcacaaagaacgaaaacaacatcgacttcttcacggacgaccaggaggacatctgggggccggacatcgagtatcttgccgccacgggcgccaacgcggtgcgtttgtacgctgtggatccttccaagtcgcacgacgcgttcatgtgtgctctgcgcgcgtatggcatgtacgctctcatcgaccttgcggccaggtaagctggagaaatcgcggtttcaacgcaatcatggccatgttacgtgaataacactttttttctgctacctcacagctgcaagaactgcgcagtaacgaagcaatcgtacccggcttgctactctgctgatcttaagagccgcggagagcagattattctcgccttcgcaaagtatgacaacgtgctggtacgttagattggctgacattcgagtcccttattgctctcatggctaggctaacccatggatttgcccgctcgacagggtttcagtgctggaaacgaagtcaacaacgaggttgaagatgacgccacggttaatgcaccttgccagaagaagttcattcgagacatgcgcaagttcatcgccggctgcaagagcatccgccaggtccccgttggtgtcgtacttgctgatccagatctatccaagaacaaccgcgaggtcaacgccaagtactacaactgccgcaccgatgacgaggacgagtatgaaaacgccgagtggtatggaatcaacgcgtaccagtattgcgacaatacggccaagaaaatcaccgacggcggcgctggcggcttcaaacagctccagacggacttcctgtcctatgacttgacgatcccagtcatgctaaccgagtacgggtgcctcaacgagggtttcccgaaagttggtaactatgaagctcagcgcacgtggcttcagacccagtggctctactcgtcagacttccgtaaggtcttttcgggtggattcgtcttcgagtactccaccgaactgcaaaactcggcgtactctaagccagcatcagcttatccttttacgagttttggcccgcaaaactacggactcggctacttctcacccgccaactgcgatcacattaccgagccgtgcgtgtacaacccgatgcccaactacgataacctggccaagcagtacaacgctaccgatatttcaggcgaaaccagcatgaacgagttcaccagtgaccgcgtcacgcttccaacgtgcccgaccgggttcccgaaattgtcggagatcacgtgggtttctgaccaatacgcgagtctggcgtgtccgacggcaatgcaggcttacacttgctacggtcagaaatcgagtggcacttgggcaagcggctcgggatcgggtacagttggcactgcgcctagcagcagcagtggcagtacctccacttccagcagcagcagcagcggttcgtcagtaactaccgccaccacccccagtggagcgacctcccagttttcgctagtagcatcaggtgtggctgtcacgctgctctcggcgattctgaacgcgctattctagacgatatgacggtatcggtacttttaacaaaccactttgcatgattaagttttagattttataagcatcgcgatatcactgaatacaacacaagtttcaatcggatcatacgaggtgaagtgaacacgagtgttcggtgtttagtcaatagaaaagatacagtagtgtcggttggtctgttagagtgtcttttcttggccgttttgaacgggcttcggtgctggaagctcaaagtctactggatgagtgcagcgcatcgcggaaacagcacatcattttctcgatggcccagtcaggagtttcaggcgtgacgggtaagtagaccaagctggaatgtacatgggcagatagtattatcagctctcgatgtgaatctccagtgcaaaatactttgaatatcactacgaacctggtcataatgctcttagcgtggaccgggtcgtgctcatgtcctagcgggctacacaatcaaataagtttgcgttagaaaggaacataaacatcgcgctctgagccttatgcagtaccttggtacgtatgcgagctgcgtagctccagaggtgacatcgaatccctgtcaatgaaaagcagtattttgtacgttagtactggttgtagaaccaaaaattacaccggtcaacgtacatgtttgttcatgtagctcacaacaccttgcggggacggaacacacacgggaaacaaccagtagtagtgtttctcagcgtggtggccagggatctaccgagtcatatcgttaaaatgttagaaatccgccgagagattcagtatgaaaagatgtagctcgtaccgaaacgttgaggagatccttgatggcattagccaactgctcactcttcgatctagacaaggaagtcatagacacgtgaaagtcagcccagcaaacaaaccagcaaaaaacatcgtaatggaccatactttctgaggagaacgtattgctcatccatgcatgttaggcgtcgatgcatgagcccaagcaacgccatcgaaggtcgatactggatcagtgacacaagctctcccccactaaagccacgaatggcagacgtgatgactttgtcatgatcggctagaaaaaatacggcagtaagaagaagtcagtgaaatgcaaactatgcatcgaggaatcagtccattcctacctccaacagcacggcaagcgtgaaggaaaagaccgtagactgccggtgtggaaataccgtgcaacaaaccatacttcatcaatcgcttgaagaagaagaggtttgtgcggctcgggtatctgcaaaataatagcaaaaacatcaccgtcctgtgaaaccccaatcactttactgactgcccacacatccacactacctcctctcacgacgacgcatctcttccagcagagcagagttcttcacgtgaataatagccccaccaaacgacgtggcggtcttgatcgttccaaagctgaacatcgacacatccgcccggttctcgcccgtgtactgcatgcccatgaacgcctgcgcgcagtcctccacgaccatcaggtcattactgcgcgcaacctcaagcacttcatccagcgggaagcgcgagccgaaaatgtgggcaatcagcatcatttccgttttctatgaccacgaaaaaaacagttagtcttcctccccaccaaaaggcatatcatatccaacataaaattccatctcgtacctccgtaacagccttcttcagctgctccacatccaccgccagtgtctccgggtccagatccacaggcacgggcaccagtccatggtaacgcagcacgtagagcatgtcggggatggtgatggcactgcacagcacctcactccccgccggcagcttgagcgtctgcagcagcaagtcgaaccccgtcctacacataacaaatacaccatcattagcctcaaaggccgtcctcttaaagtaccacatagccttgttaccggatcgagagcgtgaccattgcatggccgctggggtcccacagacccgtgatcttctgctcgaactcctggcgctggtgctccctcagctgcagacacgcggccagccccgcgccaatgtcgcggtacgtcacgtccagcttcttgcgagggaaaatcgcccacggagcggacgcagagagcggctccagcgcgcctggtgatagtgatacaaaacattgagacagcagaacattgacacagttggtacaactgcgaggttgcaggatgcgagttgctgttaaccgttcagagaggggggtacgcaccgaaaggtttgagacgagctggggaggaggaggagctgctcatggcggacgcgcgatggggtcgttcgtccactgacgagtgcgaagtgacgtgtgagctttacagtaaaggttcagattgaaaacccgaccaatcacagctgtctgagacgctaagtacgcgtaggtttcatttgacccagttcactttgtggagataccgacttgattcagtatactgaaacggttggtttatcataacgactacacacgtctctgcgacagccaaacgcaagcatagcgactggggcgcgcttcgcgtgcgggtctctaagcggaggcaaacgcaccgaacagttttgcgttttttgccactataacgctgtactacagctactacaactactgttaatgatgtcatagtaatgttgtcattgatattgcttgttcgtatctgctgctatcgctactgcgactgtttattatctgctgccactaccgctaccgttgttatttacgctacaactacgatctcagcattgataatgacactgtaatgatattgctcctgctttctttttcatgcctgagaaagactgccaaaatctactccatactgcttgacttgctgcataatatcacggggcatttcatggcttgctcaaactaaatttataagtagatgccatctgagtatcgccgcccaccttggtgaaaacgacgcgatccaaacattatcgatgatcttatcgtcgtctagacccttgtaaatcactcctcttttccaaataatgtgtgtgacttgtattgctgcgtaagtagtatcaatatgacgtattgtgtctttcacgtattttggcgggtgagctgttaattcaggcggaattagagtcataaaagggtgatcaatgcttatttagtgctaattctgtctaagattgtgggcgcttcccctaacatccgcgatcagcatttgagagctaatcaacggagatacgagcagaatggcatggattggcggataggaaaccgccaatcgctctgtttccgcctaacgaaggctggattagcttattccgccttaactcggcctcaccatcgccgttcctaattcggccacggagggacaacccggaattaacatgggaattagctaactcggggcataattaaggtcgataacggattagagttatgccagaattatcacggcagaataagtgaaaggcacaataattcttattcggtatattgctattgaaattgttcgcctgcgtcacgatcactgccagctaccactgcaactgccctactgtcaatgccaccgctactgcaaccgctattagttactgactttgaaactgatattgttatcgctatttctgttactatcttttttttgctcgccccacgatcaggaagaaaaactgtcaaggtctacagtactccatggtgcgtgagttgttgcaacccagtataatgtcatccaacgagacttcttcgcgagtttggcctgtaactttacgacttatcgagcacgacttgtctataaatcgtactcaggtatgaattgctgtaagtcgtggatggttaatcagcactaagtagtgcggaaacaccatctcctgcatgatctagcacatccagtacggattagcatccttttggcactcctagaaagtgtcgtttcggagctaaaccggcttgaaacacgacttgagcaacttgcattcaaagcctctatgatttaccactaaatacgaacactaactagtacactaaatcctggatgcaaagcacgataatacaaggtgattcattattactccggatttgttaccgtagcatcactatttcaattgctgttgctgaatggtaggcgcggagaaaacaacatactgcatgtgggcgataactttccgctgcggaccaacaccagctttaccgatacaactgcatgttgctagacctgtcggcgctcaaactgagcccgatgcactggtacatgagcgatgagagtcggtaactttctccagcttgctcaggagtcatcgtggtttcggtcggaaagctgacagcatgcttaaagccgggccttttgagctggcaattagggcagaataaccccaacatgaaatgcgccacgccagcgaacatcagcggaccaccgggtctccatcgcgcccatgataaacgtggacatctcgactcgccacgttctgctcgcactgaatctacccgtccgctggttgcttggcaggttgtggacgtggtccccgaacgcgctggcggctaaaatgaccccgtgacttaccccgaaggcctcttggatggcttttgggtcggagtggactcggaggcttggtgggtatgttccaaagcttgggggcaggtggtgatcattatggcaaatcttggagcctgcgcgcggcagacatccatggcagataagtagcggcccctcacaacagcaaagacgccgacttcaacgctggtacgctttccagatcgggatcgagtggatccattttttatattcggctatttttcaagttgctgtatgtatgttgtttttctccagccagatactgaattttaagctcttcagaaggaatatatggtggcacatctatgagagcttggagtcgtagcatttcggctacatacgtaggaggaggttggaactgctgcatgtattctggtgtgatatcttcggtaagtgttagattttgcagtgatgtcgttcgtgatagtgcaacatagagagtttgatgtggcattcctggtctttctaagggcgttaccgtaacgccatccttgcaggttttcccttgtagtttttcagctgtgcaggagaaggctgacactattgcaaattgacgaactgaaatcgatgagcgagctagattcttgaattttgacagcttaatctgtgcgttaagaactggtattccgatagttcccggagggtatccatctaccaatgtgctttcgcagtcgtgaacgcgaatgataattaggtcgggggggttaagcacctcttttacgatagtgccatgaactagtttattacgacatgcagattcttgtagtggaggcgcgaaacctactatgattccggttgttccattagcaataacgtttgcatcttttagagcggggtggtttcttgtaatcattactggcataccaatgaagcagattaatttcattggaattcggtcagtttcatcgtcgtttgcgttaactattttgttgaagattgcctttgatcgaggtgtcggctttgccgagatttcgtatatcgtagtgttagtctttgtacatgcttggattgtcattgtgtcattaattgcacatcgtagagcattagtggcgacaagaacaggattgtaataggaatccggagaacgaccagctttactcactgaacgtcgcgcgtctgtaaatactctggagtttaattattttcggtgagcgtctgatagtctaccccatcgaagttccctcaaaatttctgcgtagattgggtcgattttggcacgcatattttcggtgagaaagatgacatagttgatggagttgtagacttcaaacccaacattcctagcggtgcttgctgctcgaggtggaggtttaaagcctgcgaccatgggaatgatatgaattgccaattagcaaacgaagatactaataaaaaaactggttagaacttacatggtgttccacgtacaggtggtaactgtaaccagtcaccaaagtacatggcatgctttccacccattattttgtggggttgatcggacattgctcgtgatgtcatgtcagcggaacctagtaacccttgatctgtcatagatatttcgtccattataactaataccaccttttgaaaagcatttttcatttgcaaactgggaggagagttggattgtgtaccgtttagctgaaggttgcgtgcggagtgtattgttctgccttttatattcattgccgccactcctgtaaaggcaagggtttcaacgcttccttctcgaccccacttctcggcaaatagtagtagtgcgagaattactcgtgatttaccagtaccagcttctcctccgacgtacgctataagctgttctttgatagcatagggctgcaagacaaaaccttctggaaataatggttcttgtaaagcatctttgatatctgacaagtatgcaaataggagatgcctcgctgcaatttcaaatatcgcgtgctgccaaaagttgaagttaaaggcctttgagaccgtttcaatgctaggaaaggcaggtatagaacttatcgaagtggctgtggcttgatcagccccccagggaactgcttcgatgcagtcctggagtctttctaatcttgtcttggcttcaggaaaagctgcaatgaaatcgctagttcctgttgatgtgttattgtcactgttgtatgaagtgacgtgttcggtgtagtcttcgaatgatgtgtaagcgggtacaaaagcctctgctggttgtgagtaattatcgcatgtgtcgttgattgtggagcgcaaattctgaactgcatcaacaggacacgtgtacaatgtttcgctgattaattgatccatgtatgtttttaactcgttgtcgctattatcgccgtcgctccttgccgcatcggaaaagtcgtcattgtctatttctgtttctcgatcgtagggctgccatgaagctctcgaaggagattttgtgcgaagcagaatgtcttcttgtgattcttgctcttctttttctatagcttcagacctgtaataatctatccacttctcttcgaattccctcatttgagtttgttcaagagctgagcacgtgaatttaaacccaatgtaagcgcgttcagcgtttggataccctccaacaattctaccttctcgatgtggtttaaaaagtgtcaaaagcaccaaatagtaaaactttctgtcagtatcagatgtgttagcgttaagatctggcaattgctttcctgacatgatgaaaagttgccgatgtgcatttttttcaaagtgtagcgccccatcggcgtcttgtttctttccgctgtggtaccattcacaaatagtgataaaattgacgttatctaactcttcttgtcgtttccagtacatacttagcttgcgtttaccattcgatacgggcccgtttgaatccgagttaatatcttcgggggtcgtaatttcaactgtcggtgaatttgtactctgtagcatcttttcgaggttcacatacgtatgttcatgtgagaaccaaaatggactaccgcgatgaatatataaagcggccattggtgctgcaacttcttggccgttcgtcagcgcatatagatagatgagagcaatttgtaccctctccgttctgcagtgtgatgggttgaccaatctgctttttccacagctttgttgaatacaccaactgaaaagcgaacttcgttttcgatgggattttgcattttcatgcaatacttgcaaatgtatgctgctgcgtttttagcgctggctccaaacacaagctgctcgtcgtggttacattttagcgtttgaattaacgttcgattgtatgcatttacgtactctgatccaatcgaccggctcaactgcaaatcgttcccgtcgtcgatgcaagtgttttctagtctaggttcatgcggcttaaagaaacggcagacagatgctttcggtgttctgcgtgtaggcttaaggcaagaatttgcgtggctccaatagtgaacttgtacatcgcggacgatgaggcttaattctagtgccgacaatgagctattatcattattacgcggtggggagcatataataaaatcaatgttttcaggtgataactttactgcattgcgacgcgcagcaatatcaatcgcagcattaatcacatctttgtctctatacttgacattacaaatctgacaacaagaagtaatcggtgcatgttgtcctggcaatggcttccggtatccatcgataccgaccgcaactggtttcaattctccagcgtcctcattgaagcaacgatttggtgattcaaccactgagatagttgttgttgaaatgcaatcaacataatcggttagacgctgtgtgaatgctgcgttcgaagatatggcttctttcatttgctgtgacgtggtaggaaatccgtgtaaccataccgcgaagtgggcatggagatcaccaccctgttgtgtttctgcggcagccccaaatgctcgaaccacaccgaaaattccccctcctttcttgggttgatgtgtctttcgatcccacacaagaaaaacatcaattataatagtcattattctatcaaaaaataagtcgcactacattgggtggttgttggcaatgcgcttccgatcagcacggtttggtaaaagacgcatgttggcttcttcgattacgtgatgcggtagtacaccagattgttcagcaattgtataagtcccagcggtatcgggtgataccgtaaaaaatagctgtagtggtccaaaacgattcatatatccgaaaagatcgtgtcgtgctcgcattctgctcaacttcgatccataaaatgctgtctcactggtacgaagacctctacgtaggttaataacctgttgaacctcttttgggggtggatttggcttctttccatgcgcttctgctgtaacaacatgggcgtggtattccacggaacgacgaattacataacgggagatcaatcctgcttttaacgcgtcagatgacacatgaagtttaatgtgcagtgcttgtcttggactttgcagtgccagataatcaaatgcgaggagtaaaaatgcatagtgtgtttcaaatcgatgatccccgatatgtagcagccgttgtatccatcgctccactgaaataggattgaggcgcttttctctcagacccccacaacctcccggaaataatgtcggaaacatttgcacacatgccttccagcgatctgccgacacaaacgcattggattttctgacaacaacatcattcgtgatagtaggtggctgcatgataaggctagaggttcctatccaacaattttcaagagatttatcagagccctcggcaatggcagatccggcgttgttgtatgtagcgtagtctcttacagcttcggctagactatcattatcactgtttaatgttgatgtacctgttctttggattattcgggttctacaactttcgtttgcattcaattgccactcatctttatgttctcgatataccttgttgttttccattagaaatgccatacctggcggcagttttcaacatttgattcatagcgttttcgacaggctgcatcttgctcagaagttagatttccaacgatggtcacgcgcacgcgctctgagatatcgcgagggagcatggaaacgacgggcccttcagtatttttcaccgtgtagtgatgtgatcgtatcgttttgcaatttcctccagtgactgttgatatggacacgcaaggtgccaccaatgcaatggcttgttcatcggtacgagaaagtggtggaaactcttgcggtagccaacctacataattgccattcgcaatggcgaaagcaggaggcttgcgattacttttattgctgatatattcgaagcagtcgcgacaaacctgcataattgttgagttattttctctgtgaatggctacaacattagagcgagtatgagaacacagtagtagctgaatgtttccattgtatcttacctggtgggaaaaggagaaggtccttcatccgagcatcgagtgctgacgcgtcgtattgcttcaagataaactctcgtatatctgcgttgtcgggtatccgcaataaccgcgtcatgctctgtcgaacacaagggtaagagaagtttcgcatgacacctaaattaaccagagaacaccttacctcggcaatggtatccgtcaaaggtgtcagttgtacatcattcataggatgcaaaagctcgcacacgcagcaaattgctccttcaccggttgaagcctcaaacatcctaactgcagaatgctgaagtctagctaggtctacctcggttggtaccttaatgtttaaagtgctatccattgcatcgagctccgcggaggtataaaacgcagtctcatctcttaatgcttggtttcgaaaccggtgaaagcgttgatactctgcttcccgctgtctatcaactttacgacgtttccgactcggctggttatcttcgtcattgtgtctgcgcttattgctatccgaagcttgttctcgttctgttcttattcgtctttgttccgcaagcagtactgcatacatagggctactacgaatcgctcgcacctgtgcactcagcccgcacccagcgccatcttcacacttagtctcttcctccattggatgtctccgagaaaactgctctttgctactacagaagtaaatacctgaagatttggttactggaaaatatgaaactgaaaaattggattggaggagaaaatgaaattttggccagtggctgcagttgtactaatagtgcgtcactgttagtacaattgcacaattagtcgaggttagtgcctcgacgcacgagatgatcgtgggcgtgctggcgagatgaccgcaggcttcggtcccgctgtcaagatgaccacacgctcacccccacactgccctcgcacccaaaacccaagccactgttgtcaaagatcatcgtcgactattgctccgagttgctcaagctcatattcgtgggcgagaagctgttgagcttcccctccgaccggtaactggtcctgtctgccgacgtcaagcccgatcccatgcagtacatgcccttattactttattgtggatgcagctcttcaacgaacgcaactgctgcaagatccacggcgataccaaatcttggaggggctgctgatcaactcgctacacggtcgaagtatgtcgctgaggaacctgccgcagccataccagtactatagcatcacggtggtggacggcacaagagcgacgtgcccaactacttcccagcaaacttctaaaacggacaatacatggcttgacactgacaactcgttatattaaattaggcttacctaccacgatgatctgctaaatacctttcttctggtgggccctgcatgaaccaagctcatgtttatcatccaacgcaaactgctgaacactggttgtgggtagttcgctcggcatcttgttcagcattttcatgaaagtacgtcactctgccgcaatcgccgccgcctccaacttgtcggaccgcttagaggccgcgctcctgctcagccacccaatcctccgcctccacttgcccctgcagatgggaatggtacatctgcagctttcggaccttgccaatgacggcgacttcgccaacccggtgcgggcagcgcactccgcccaggggacgcttacgaggcttccacattgtcacctgcaacgtgatagtgttgcgcatcgcgcggtccatcttggccattctcgccttcagcccagcctctttgccctcgaaaatcgcgtcgaccaggtcgtaccgatacagcttgggctggtcctcgatcccagcgacacacagagccacaccaacgtagtcgtcctccttcggcttgtgcgtcaggtagaactcgcgcaccccgcggaccgttcgcatcggcgggagtgcccgtaggcgcacttgctctgcgagcatcgcgtccatctcagcgaacgggtcctcttcggccatgaggcgcaacttcacttgagctccggatcttgtgcttggctgacaattcgtttctgctgaatgcgcacactaggcacagggatattgaagtaaagcgtctctgggacttgccttaaataattctgggacttgccttgataatacccaagcgctgtcgctgctatagtcctttggcgtcggctcgacggtttgcagcaaaccaaacttgcatcttgctacaggcttgatctgcagctttatgcgagggttggaccatctgggttacgacagaacttaatggtccagccctcgtataaaccagcagcgggtggtgtaggttcgctgtcactgcaaccaacatggccttgaagatctatgctgtattcttacttacgcactactctacactgtactgtggttgaaattcaatctggcccggcccacacagcacctgtcgactacagcgtcagcccttcacttctgcgtagctgtttatcaccatggcgcttatggtcgctggatacgaccaagatcactgtgcttccacgccgatctacaggtgggcttaccccgtcgtgaagggcggcatcacgtacagtgcttagcgagcagtacaatactgactgcccccggtgatattgacctggctactctcaagtcggtcgttaacaaagacgtgcagcttttggaatgtttaatcgcctgacgatagccgcggcgtcctatcccatccaccatggttatggtacgatgagatgctattgcacgacgagctagcaagaataattggagtttcatttgcatgtcatgatactgttatcattgtcttgaccgcgtagctctgtggtgtgcgtcacgtacagcagcgacgcgatctccacgagccccaccgtggcgctcggcatggtcaagcgtatgtagcgtgccgtcgagcatgcccagcgaataccgaacacggcgtgatgaaaacaatgttgatcaatgggcagcaatgcacagcgcaggcgatcgttcatcgcgtcgcctccgaagtagtaatggtcggtcggtgaggcccacacgtgcttatcattgtcttgaccacgcagctctatgagctgtgtgcgccacgtactgcggcgacgcgatctccacgagccccaccgtggcgctcggcatggtcaagcgtatgtagcgtgccgtcgagcatgcccagcgaataccgaacacggcgtgatgaaaacaatgttgatcaatgggcagcaatgcacagcgcaggcgatcgttcatcgcgtcgcctccgaagtagtaatggtcggtcggtgaggcccacacgtgcttatcattgccttgaccacgcagctctatgagctgtgtgcgccacgtactgcggcgacgcgatctccacgagccccaccgtggcgctcggcatggtcaagcgtatgtagcgtgccgtcgagcatgcccagcgaataccgaacacggcgtgatgaaaacaatgttgatcaatgggcagcaatgcacagcgcaggcgatcgttcatcgcgtcgcctccgaagtagtaatggtcggtcggtgaggcccacacgtgcttatcattgccttgaccacgcagctctatgagctgtgtgcgccacgtactgcggcgacgcgatctccacgagccccaccgtggcgctcggcatgggccatggcgtgatgaacacaatgttgatcaatgggctgcaatgcgcagcgcagccgatcgttcatcgcgccgcctccgaagtcggtccgctaaggcccacacgtgcggcgttttattccaaaactgaatactcgttaaatacatcgatccgaccgcctctgccgctttataccggtagtaccagccgattttgaatactcaagttcatattaaaaagtaccgaatgtttaaaactgatggtctgacaagaaatgacgctggctctaagctatccgcttagagaattgctccttatcaatgtcacgccctcatactgtactgcgcttccagcagcaccgttctcgccatcctgttcacaacagttcacttcgagcttgtgagtggtcgactaatgaaatcaacttcaacaggtatgatccaatcaaaagaatatctccgacgagctccattagcgccgatggactccgtcggcttggctcccactcgctttatggtgcagcgaccgagtagtcgcgttattggtagagaaatggtaacagcgactgcatctagagactccgacgagagtggtggttacattgtcaaaactaatcttcaaagcgagttgctgcttcaggtacactggaaacggtatttagtctcactcatactatttttgtttgtgcggttttcacataatatagtgtgagtgagactcaattacgtgagaaaactttatatgattttcagtatacctggtattttgttatgaattagtctcactaagactatttcgaactcatactattatttcacacacactaaataccgtttccagtgtagctaccaccttagaaaggtaagaccccgcatatgagcttccaaagccggtgtgatttgagcacatacaaacaatatatttgtgtcgaccgtatccctcatggtcactaaatgtgaaatttttaccgaaaaaaaacgatcaggacatttaggtgaacgaatccataaaaaacaagagagtcatcgtgattcaaatgaataagcaaagttggaggaatgacagcggatcacggggggagggggatgttaaccagaacgctttgccgctgtcatcaaataccatcatgtccttaaatctgcgcgctcgaaatcacccagagcaacgtgaggaactgagaagtctctccgcacgtattggtggtgccggtagttgccgacgccgaactgctgttactgctgtcgacgtcggtaattgccgacgacgagacgttgttactgctgtcggtgtcggcgctgccactgctattgctaggagggatgtcgactgtacccgatcccgagccgcttgcccaagtgccactcgatttctgaccgtagcaagtgtaagcctgcattgccgtcggacacgccagactcgcgtattggtcagaaacccacgtgatctccgacaatttcgggaacccggtcgggcacgttggaagcgtgacgcggtcactggtgaactcgttcatgctggtttcgcctgaaatatcggtagcgttgtactgcttggccaggttatcgtagttgggcatcgggttgtacacgcacggctcggtaatgtgatcgcagttggcgggtgagaagtagccgagtccgtagttttgcgggccaaaactcgtaaaaggataagctgatgctggcttagagtacgccgagttttgcagttcggtggagtactcgaagacgaatccacccgaaaagaccttacggaagtctgacgagtagagccactgggtctgaagccacgtgcgctgagcttcatagttcccaaccttcgggaaaccctcgttgaggcacccgtactcggttagcatgactgggatcgtcaagtcataggacaggaagtccgtctggagctgtttgaagccgccagcgccgccgtcggtgattttcttggccgtattgtcgcaatactggtacgcgttgattccataccactcggcgttttcatactcgtcctcgtcatcggtgcggcagttgtagtacttggcgttgagctcgcggttgttcttggatagatctggatcagcaagtacgacaccaacggggacctggcggatgctcttgcagccggcgatgaacttgcgcatgtctcgaatgaacttcttctggcaaggcgcattaaccgaggcgtcatctccaaccacgttattgacctcgtttccagcgctgaaaaccctgtcaagcaatcgaacctatcgaaccgatagtttagcccatagggataattgcggagctagtgtacaaacaaccattttaatgtaccagcacgttgtcatactttgcgaaggcgaggataatctgctccccgcgggtctttagatcaccactgtagcaatccgggtacgggtcccttcgttacagcgcagttctcacagctgcagggcgacagttaggcttgttaggtattccacgacaaacgcactgcattgacaatatgcagtttacctggccgtaaggtcgatgagagcgtacatgcctttcgctcgcagagcacacatgaacgcattgtgcgacttggaaggatccacagcgtacaaacgcaccgcgttggcgcccgtggcggcgagatactcgatgtctggtccccagatgtcttcctggtcgtccgtgaagaagtcgacgttgttcaagttctttgtgccggcattcggacggggatagtagtcgatgcctttgatcgctacggggtcacccgtcccggcgtcgaacatgcggtagcccttgatcttgatggggttcgtgtaaccctctacgttcgagacggcgagggcagcaaccaacgctgcgcgagttgcggtgaggttcatacttgattcatttggtggtggccttgttgagtcgcttttctacgctagtccctttgtaggagacctctggggacatttcagacgggtgaaagatactttacgggacgcgaaagggtgcgaccgctccgacgagctccattagcagcgacggtatccgtagatgcgctcactgcactactgctcggccgctgcatcatgaagcgagtggcagccaagccaagtgatgccgccacgccggacgaggccctgagcgcgtccgactcgacgtgctacgtgtctctcagcgaccacatcaagcgctcacgcactaccagccaggacgagggtctcctgctgtcctccatcctcccggagcagtacactgggtcggtgtggagtctcgaggcgctggcgatccccatgacgtacatgatcacgggtctgatgtactcgttcccgcaagccaacatcgagtacttcccaaggacgttgggcgcctccgacgctcagctcagcacggtggcagtggtgcgagccctgccctggtccttcaaggtgctcttcggactgctgccggacgttttcccgatctatggccagcggttcacgccctatttgttcgtgggctgcgtcacggcgtcctttttccacttgttgctgtcgattcgcagcgccacggactcgctgacgatcgtgtcgttcacgctgctactgctcggtgctactgttggcgtcgttatggcggacgtgatggcggacgcgttggtggcgcatcgggtgctgctcctgcagcagaaatcgcccaagaggtcaatggagacgaagctacagacggaagacgggcggaaacccaagcaacagccagaggggacgcatttgcagaccacggtgtacctctgtcggtttgcgagtgaaatggtgggctactggctgggagcattgctgagtaacaagtcgcagtgggggtggggcgcctcgatgggtcagcagttcgccttcctcgcgttcattccgatggtcacggtactcccgtcgttaaggtacttctacgagcccactgaagagagcggacccatgccgctagaagagcaagcagcagggatctggctcatgctgcagcgtcgggcaacgtggcagccagtgtgtttcctggtgctagcgaacgccttgttcgtgcagaatgcgtcgtgggggaattttctgaaagtcgcgtatgatttcagcgccttcgagtacggatcactgagcggtatcggagctactgtcacgttcgcttcgattgtcgtgtaccgattgcatattctaccccgatacgaggcgccatggcacgatgtgtacttcgttacgggcttcgtggtcgcaggcttctcgctgctgaacgttctgctggtgctgcaagtgaacgagacgcttgggattcctgccttttggttttcgatgggtgacgctgcaggtgaatcgttcgctcgtgggttccagtatctcccggtggcgcaaatgttcgtggcagtgtgccctgatcaccaagaaggagtggcgtttgcactcctcacgagtgtgacgaacctcgcgcaggcgttcgccaacacgatttcgaacatgctgctccacatttggcctgttgaactcgaggatcttcagagacgaccgcatgacttcagtggggtgtggaaactgtcggtggtcacgagtatcatcccgttgattccggtggtgttcttgacgacccgattgttgcccaagggaccacgtcaactggaagaaatgaggcatcacctttccccggtgggcgctgcggttgttgtgggtctctatgcgttcggattcgtgtgggtgatcgtattgagtatgctagcgatattctctccctgtcatgtgctcgtaggtgggcacggatgccactaacaaggcgaacataatgccttcattcagtagaaaaacctttcttgctattgtactgtttgaggttttcgactggagctatccactaagtcgaaagttgatgacaaagtaaggtgaagacaaagaatgtgttggtctagcgcgagaagcataccgtaaatttacaaaactttactatcacggtaattttaccgtaaaatgtatatcaagggataacgctgtcgaagattccaacatgttttagatacatgcagcaatcttcgatgacgttatccctacatttttttagcaatcttcgatagcgttatcccttgatataaattaaatagcgataacgctatcgaagcttgctatgtaaaagtagcaatcttcgatagtatcggctaatccgttgatatttcgaaaaccgtatgggtgtacatattaccgatattcacgcttagaagttattcgtgttggggagataacttctaagcgtgagtacggacttctttgggaagatgttcaaccattttagaggtgcaagattcacttatggatgcacttagtccaattgtatgcagcatatttcccatgcgagcacagcgcaagataacatgctgcattgccatcctagaaacgaaacgaaagggtatcgaaagtgtgatcccttgcggttgttgacgccaacgtatgcggtggctggcagccagcgggcccccgatttccaaggcaaaccttcacgttaattcttgccattctccaacttcctcccctcacgacacgcaccgcacacgtactcgctatatcaacgatgcgagtgctcagctgccacattcatcttctgctgcgaggctgagacgacaacaaacgcggctggaacggtaacgaacaaaagagccctcagaagctacgacatgaacgacttgaacatgagggcgtcgaggaacggatgattaagctgaattccaaggaggcaatcgacaagctccttggtactggcgatcacttcaagaaagtactatgcacggcacgagtcgatgaagtctttgccggtggaaagaagctcgacgactggcttgacaagaagacacttaataagttacttatcaccgagccgaaggaaatgagacccacgttcgaagcttggtactaagtataagaacaagatcaccgcggaaggtttgcgggaaacgctgaaagtcgactcggccgtgcagaagaattacagaagatgtatgactggtttctcaagaaaaaggcggcaaaagctgtcaacgccgctgcccagtaaggagacccaccgacactgcagtctatcctccccccggatattcttcaaataaagcatttttatcacatctttttattattgctgcgcgtgtacaataaggtgctctcggactcgccaacaccagacagcatgcaccttaaatccatcacgggtgtacagcaccatactagagttaaagctacacgggttgctcaatcaacatcaacgttgggtgcgcgtttcgagcgatgacttcacgagcccaatcagtttttccagttgttgcttgtgctgtgtcgacgaagattcgacgacttgcagggcagattcaggaaattcacgatccgtcatctccttttgtttcaaaccagcactgcccggcgacaatgatggtaggctgccgacgagttcctcaaactggcggcttgactctgcagtagcgaggtcgataaaagcactcagccgtctgagttgctctgaacggcttttagctcgatccagactgaaaggtcttagctggacatcgtagtactctgccagcactctgcaaattgctggtgttatccctggccacgcttcaaatgactttcgtagtgcagatttatactgtagatcggggttttgtgcttccagcagccatgagcagcagtacaactcactagcagtcggtcttttaaccgggtcggcaactaataccgactgaagtagagcacgcgcttcgatcgaaagcgccggcggcagtaccagttgctgcgatccactacggagcttctggtaaagttggtggaagctaacaccctggaaggggaatttaccacagagcatcacgtaaagcaaaacaccaaggctccaaatatccaccggcctcccatcatatcgttcacttgcaacgacctcaggagccatgtacgacggagtcccacaaaagtttttcttcctcattctcttcttctgagctctgtcatcagctagattaagcgtttgggggtcgctgcactcttcgaagtcgctgaagccaaaatcgatcactgttgcgtgccccgagctttcgtccagcaagatattttcaagttttaagtcgcggtggattacacgctgagcatgaagtgctgccacccccgcaacgatttgtcgaaatagtcctttagctcgagcttctgaaagtcgttgaccgggagcacgacgaagtatatcgcacaaactggtgccttttatcagctctgtgacggcgtgtatcctcgttggtgtctcgaatacctccacaaagcgcatgatgttggggtgtgcgtgtaagcgtgaaagaacgtgtacctcttgtcgaactcgccgccactcgagtgcatccccatagcagtccccaataacccgcttaccaattgcgtccacggctaaacaggacctggcaccgtgcaaacgcgcgtagcttttgattgccacgggggtgccactcagtctgtgggtggcgaagcgtacgcggccaaacgtccctcgaccgatctctttccccactgaataccagcatgtgatgtcattcagttgattcagcttctccgcttcattatcctgttgtcgggaaggtgcaattctcgagtttgggttgccttcgggcagcatcacgtcgttggtcaaagctcgtactaaagtggctctggcttgcgaatctgcggtgtcagctacgtcccgcatctggtcaacgaaaacttgcactgcctgctttgcacattgtagttgtatcggcgagaaagctggtattcgagctggtagatccgttagcgaactattgcgctgttctactcgatcgtagacagtttggagggtatcaaccgctgcattgttgattttgactttcgccactgggatctgcttgcgcactagccgcggtgtgcagaacggagagcatccaaagcttgttcttgcatcttcgagtgcattgtccagtcgactaacgcgtcgagttcgagcagttaccgcgccatccaaggctcgtcctccagctcgaaatcgtccaggcgccgacgagtttctgaaggagccctgacatggcgttgccgacttgtccattgaccgacgttaaagctacttgagctttaaaagttgattggtacgctctcaaagggagggttcaacctttggcgcggttatttgtttgagtatttccggccatgtaaccatttctcatgaacgaagcggaaacccctcaacggtttggtcatgttcgagaccgcagagcatgtaccggatcagtccaccaccaattactttccaagaccgacaaacgcaggcaaatggctagtccgtcgtcaccaaggaccaaagctgcggctgctgtgagtcaggccctgggggaaatcaatctccctccagcacgaaggctcgcaccgtcgtcactgttggcaaccggaggcacgctgccaaaacggcttccgcatgacctggtctcacagcgctctcgagctgcaccattttctccagctgcgtatggtcgcccatggaagactgcgcttggtaaccagctgaaacacgtgaagaatcaacacgaagtcgtcggggaggcgaagcaacaactcgatagtcttgcccaaccacacactgcaatcgcgattcaagacgaaccagcgactagcgaccccactaaagctgatgatctgcctggaagaagtcctttacgccgtctccgagcgaatgaagttatccagaagcatctccacaaaccaaaccatttagaaaagacccgacagcaacgaaaacaagatgccagtgtacatttcgctgctcaaccggatcgacgcccagtaagtgttgccgcagataatacggtgaatcacacacgcgaagatgaaccaacaagcacagcgccaaccgctcaacgtcatgctcagtcagcagaaagcctacagcttacagcagaaactccaccaccaacagatcaaccaccagcgctgccactacttcgtcgaaagaaaactcaccatcgccatcagtctttgcctccgccgcaacatcagcgcacctcgactggaattgcagcagtcttgacacctcccaagcaaccgcaaactttatttttccaaacaggtgaagaagaccgcgaatccgtcgttgaaaaatgctcagtcgctgagccttccgtcgtctcgccaactttctccacaggccgcgagtctgaaaacacggagagggtagatacgtctcaaaacgatagtcttcggggtcgtaaattggtggaacgcatctaccgtcgcgactcaggtgacgaacggagcgcggacgatagcagcttcagagtgactgggaaaccagaacgtatcgggaagctgtcgcgacatgaagatgagttcgacatcgcaattctgctaaagccttcgaagcacgaagagcccatggatctgcccgaggtcacggccacgctgaagccgagcgccagaatcgacgccagcagcgaccgagctgtgattatcagcagaattcggcatacagggctgcacgtcaagcgtctactctccatggacgggaaacaatcattactcaaggttcgagctccgcaacgcatgctggagcttggtgcagagcgactccgccttcgaaagcaacgacgatttgataaagtctggatgaccttctcgtgtgaactcgcatccagctttctggacttcgacagagatcggagttgtatcaactttctcgatagcgagaagcagagtatcgtgcatgccctcctgactgcatctgagaccgacggcggagccggacttaacgagtcctgcccagtggctgcaagacacgtagttcagatgtacccgctccacaagcaggacctggcgctgttgaagactcggtgggtgacattctggcgggcctcgctgcttactgccaagcatgatcacgatcaaactcagaacccaaacttccggtgcctagttgtccgaagtgtactgcatcagccgctggatgacgtggcgcagtacttcggcgagcgcgtagcattctacttcgcgtggatggaaatgtacacgcgctggcttgtggtccccagtgttgcaggcgtggtgttgttcgcgctgcaagttcactcgcaacacctcgatcacccggcagcaccagtttacgctgttttcatggcgctatggacgtcagctttcatcattgcctggaaacggcgagcggcagctctggcctaccgttgggggacttgggggtacgaagatgaagaggtcacgcgtccagagttttatggcgaggatgggagcaacaagtctcatgatgacaaggagaccgattaccagaaaccggttgaaaggcgctacccactctggaagcggcttctcaagtacagcgtcacgatgccctgtgtagctggaagtatcgctgcggtggtgacgctcgcctactatggtttctctactcgcgacaagcttgaagctcagtcccttgctacgaagcacgaagctgcggaaattgctgacaagatcaagaggttgagaacaatcacgttagaagatatccagcatttggcgcgcctaggagtccgatgggatttctgggtctaccttctcctcaccccacttctctacggattgttgatccccgtgctcgatgctgcgtttacccgagcagcgcgatcgctaaacaactgggagaaccaccgcaccgagtccaggtaccagagccacctcatcctcaaggtcttctccttccggttcgtgcacgtcttcgcttcgttgtactactactcgttcgcgccacacgcctccagctccggctcaaataccgatggggagtccgcagctgcaacaagcgacggcatggtccgcgttgctattcagctagcctcgttcatggtaacggggcagatctggaagaacgtcatggagacactctacccatttgtgcgtcggcggctcgatgcccgcgcaaagaagcaaagcagcaacgagcagttcaaccagtccacagtcttcagcggcgccggcgcagcgacggcaccccgaggccccagccgccatcgtggcagtctcacgacatccaccaagctcgcgcctgaggctgtgatgagcaccaacgccgtgatccacgagcagtgtgtgcggctggagcaagcgtccgaccgcgcgtgggaagaggctggactgaagcagtacgacacgttcgaggactacaccgagatgctggtgcagttcggctacgtgtccttcttctctctggcgttccccttggcgcccttactggcgctgctgaataatgtactggagctacgcaccgacgccttcaagctctgccacacgcggcagcggccgctcgcgcacaaggccagcggcatcggcgtgtggctgcacgtgctgcaggtcatgagcgtgctggccgtgctcaccaactgcttcaacttggcgtactccacgtcgctgctggagcgcgcgttcccctccgtcactcccacgcagaaggtgtggatcgtgttcggcatcgagcacttgttgctgctggtcaaagtctggctcgactgcgtcgtgccctccgtcccgcacgaggtctcggagcgtctgcgtcgggagcgagagctcgccaagcacgagagcgcgcgcgcaatggtcgcgcagatgctgaagacggaggccgacgccatctccgcgagcgacagctccgacatgagcaagcaggggtcgatgcggcgccggtcatagttggcgttgaagtggctcgaacctcttcacaggagactcggattgattgatagatgttgcttatagagagagatgggttgaagtggaccaaatgtgtactttacgcgtatattacgcttgaaggggcttgtttacgcgttggattacgctttattgcgtggctttgggcgatcatatttttggaaggccccattcgacgaagcccaagctcgcttccccttccgcatacaaacccctagtcagaacatgtcggacgccgccgccgcccccgcgcaggatgtgcccaaggaggaggactcgcgcaaggtgaacctcgtgtccatggacggcgacagcttcgaggtctcgcgcagcgtcgcggccatgagcgagctggtcaagacgctcatctcgggtacgtggagtgaacccatggcggttaagggaaaaggagggggggttaagtggtgctaaacgcgtggaggggggggggaatctctaaccgagggatgtgttgcagatgacgccgacgacgacgaggtgcaggagatcccgctgcccaacgtcaagagccccgtgctgtccaaggtgatcgagttctgcagccaccaccacaacagccccatgcgcgagatcgagaaggtgcgtcgctgcgtttagacagtatgcgcttgttgcaggttagagagtatacgcattctctaacccatgtatacgctcttcctacctgcagcccctcaagagcgcggacatgcacgacgtggtgtcggactgggacgccaacttcgtggacatcgagcaggagatcctgttcgagctcatcctggcggccaactacatggacatcaagagtctcctggacctggcctgcgccaaggtggccagcatgatcaagggcaagacgccccaagagatccgcgagacgttcaacatcgtcaacgacttcacgcccgaggaggaggcccagatccgcgaagagaacaagtggtgcgaggaggcttaagctgaaggaggacgagagacgcctaagagtggtggctacactattgcggggcagcactcgcgcccacgcagtccctcgctctctctaacccccagagaaacgaggaagacaagcttttgccacctaaatggccgcgtgttgagagcgagttcggcagataaaggccgtgtttgcagtgttttgagaagccgaaagaaagaaaatctcgagcgttatatttttttcatcaccacgacgtttcttttactgttcttgcagtaacagcaaatgcatttgctttgccttcatggcttgcgtctactatagctctagtattgctccgaatcatgcactagtgtttgttggttgggagatgtttcatccgtaattgcgcggcctctttgggggaaacaaggccgcaaactcaacgggacggttcgctggtataaacggttgcttttgcagtcgcttgtaagacctggctgcatgaggtggcaacgccgagtctgtcgcaaataggactgcgagtgggcggaaggcaaaggctccgccactctcgactgtacatacaatttgtctcgaaatacaaagacggagacttgagccccagggagtctgtttggggaatgacagaacagtggcaagcgcaaaaggcaacccaagaaaatgactggctgcaatgcaccacaagtacaatgccacatcctaggtgcgttgaaacgacaaactcggcccgtatttgttgatttgtttacagtttgtatgactttggattgaacgggccgggtaggaccgttatttgtggtacatgggttcaatgctgtttatggcagacccggaagggtgcaacttcaacgtgcaagttgcctttttagttgtgtccatgcaaagctgtggtgtcaattgtatcttcgtttactaactacgtcgtgccaagtagcgagcgccaagtgttggcggcgaccatgttcgccgtcatggcgagctcaccgcatctgggtgaagctggagctgttgaacgcggcaggctggccaaagccgccggtggcagcgccacctccgaagcccgagccgaaccctccgctgttggcagcggctccaaaacctccgggctgcggtgcggcaccaccaaacgtcggtgtctgggagctgaaggcactgaagcccgatccggcggctcctccactaggagcagcagcggcggccgcgccaaacccgccgcctccgcccatacgcgacgccatgccgaagccagagcctgcagctccaccgaaagccggctgagcggctccgcctagagtcgaggctgatccaaacgcaggggcggcactagcagatcccaaggccgacggcgcgccaaagccgctgcctccaccgaacgacgaggtgctgggaatgccgaaacctccggcggcaggcgctgccggctgcttgttgacgtacttctgctccagcatcgagaagaggtggtcttcgcggcccttgtacttctccagtgtcgcgtccacggagctcagcttcgctgggttgtgctgctggtagaacgccgtgagcttctcgcggtagttcacgccacctgccgcagctccaaagccgctgcttgcggcaccgaaaggagagggggcaccgaacgccggggtcgtaggagcactcgactggaagccaccgccaaatccgcttccactagcagatccgaagccgctggacgtttgagtagcggcaccaaacggggacgcagcgggagttggcttcggcgcaccaaatggagaggcaccaggagtgggcttcgatgcgccgaacccaacagagctggaggagccgaaagttgccccactcgaggtgttggcagcagagaatgctccgggctgaccgaacgggctggctgcagcattaggcttcgcaggctgcagggccgggctcgcaggcggcacggagatgcctccgctcgcgtcgttcagcttgtacttgacagccaggttctggaagagcttctcctcatttcccttgtacttctgaagcgtggcatccacactgctgagcttgtccgggttgtgcttttggtagaattctaccagcttctggcggtagtcgacagcaggtttgccgaaaggagatgctgtcgcagtagttgtcgcggtcgtggaagagctggtcgctgtggatccaaacgcaccaaaacctgtggacttgtttgctgcagggccaaggctaaaggctgaaggagacgcgccaaacggactaggcttggcggcaccatccttctgagcagtagctggcgttgcaaaaccgctgaaaggactcttagacgccgtgggagctggcgccggggacttcgaggcggctggcgccgatgtggacttggggggaactggtcctccatgtaaatacttcttgacattttcgggtgtcgaatcggggacgtacatcgtgaacagccgagtgaacaggtcttcctccctgcccttgtacgttgtcaaagccttctcaatcacgctgccactcttggacgggttgtgcactttgtaaaacttctccaaaagcgccttgtagtctgttgtagcagcagtagacgaagcgggctgatccgtactcttcgagtccttggatccgaagctgaaggcggacgatgatgcaggcgcctcttttcctcctagtgagaaggcaggagcaggtttggcctcggtcttcagcttcggctttactgctggcgagttgactccaaatccgccaaacgctgacgtagttaatgcagcgctcttgtcactttccttcgccgctgaggcaccaaacgcagtcgcactgccactcgacgacttcgggaagctgaacacgttagtctttggtgcagcagcagcagtagatgtcgttgcgggcttcgcttctgcagcgggggctcccagacttggtcgctgcggtgccttgcctacaccaacactaggctttgtcggctggggagtttgtacaagcttggcaggctcctccttcggtgccatggcttctgcgagcgtgaacagttttgaccctgatttaactggggtttccttgaacgatacggatctggacgattgttttgccgagctcatgggagacgcaacacttagctgtgtcttcggcatcagtttgctgcaggctttgatccggaggggcgaagtagacgaatcggatggtgtaggaggtgccagcttccgccgcggtgtagagaaaacatctcggggagtcacgacattgttgcacagcgacaaaaagttccggcggacgtcctgacttcgctgttccgtctccacaatcacctggaccatttgttccttggtagccgcggaatgaacttcactttccaccgcagaaagcccgctgacgccgttggtttggtgcattcgatcgccgcgcaaactcaacttctccaactggtcagccaatttgcaagccttgttgtactgcatcttggagttatcgtaagtttgcttcaaaacgcggaacaagtgcgccgaagacgttgcgccggctgcatcagtgccgatcttggaagaggaaagatgactgtcgagctcaagacaacacttttccacctcgtccaatttctctttaagcgatgtccaggtctccttggatcgctggtcaagcggctgctcttccagcgttctcttgagagcctcatcattaaagctgttcaaaatttcacgaccatactcgagctgctcgtgcacatcaccgtcacttccgatgacgaacaacacgtctttctcgatctgatcgcgcgactcgtccaaactgttgatttcatcacaaagactcgaaatctgagcgcgtagcttgtccgttttagccagcagcgtcttcgagaattctgggtccttggacgaaatgttcttcgagccctggtttacccgctgaagagacttgtcgaagtccgcaatcaacttccacagttggccttccatccgagacgatgggacacccttcgacgacttaacaggtgctgaggctgactttgcttgagtcttgacagcagaaaccggtttagattttgcttcaaatgcacttgagtcgccaaagttcagagtgcgcttcgtcttcggctcgtcatcggagctgtccttctttgcagcagtgtcgagcgttgaagacacactgtcgaatgagaagctcggtcgcgctgagctagttttcgaagtagcctccttcggctcgctggcagctggtgctccaaacgaaaatgcacttttcgaggttgccttggggacaacgccgaatggagacgaagacgtgtcgggcgctttctctgtagccccgctgccaaaagtacctccaaacaaggatttggacttcttaggagtagttttctcatcctgctcggtcgactccgacgatgcttccgtctttgatccaaaaagacccttaccaaaagagccgaatccaaacgaactcgttggtttatccgaagcactcggctgtccaaacattggaggtttcggcttcgacgtggtgtcaggcgggtagccgctagcgcttgcggcaccaaacgctggaggtttgggctttgacgttgtgtcgggcaggtaagcaccaccgcttgcagcaccaaacgctggaggcttgggtttcgacgtcgtatcaggagggtatccactcgaggcaccaaacgccgggggcttgggcttcgacgtggtgtcaggcgggtagccgctagcgcttgtggcaccaaacgctggaggcttgggctttgacgttgtgtcgggcgggtaagcaccaccgcttgcagcaccaaacgctgggggcttaggcttcgacgttgtgtcaggagggtatccacttccacccgcagcaccaaatgccgggggcttaggcttcgacgttgtgtcaggagggtacgaactactgatagcagtagacgtcgtagctgccgaactagaagctgctccaaaactgaaacccgttgcaggcttcgctgtagtcgaaaaactgaatcctgttccagatgttgacgtaccgcttgaagctccaaacgctggaggttttggcttagatgtcgtgtcaggcgggtacgcgctgccgctcgcaccaaaagctggaggcttcggcttcgaagtcgtgtcgggagggtaggcactcgtagcaccgaatgctggcggcttcggcttcgacgtcgtgtccggcgggtagccgctggcactggcggcaccaaacgctggaggtttgggcttcgacgtcgtgtcaggagggtatccactcgaggcaccaaacgccggcggctttggcttcgacgaagtgtcaggagggtacgagctgccgctagaagcggacaccggtgcttgatccttcgacgtcgtgtcagaactactggtagcagaagtcgtcgaagttgcagtacttgatggtgctccaaaactaaaaccggccgcaggtttcgtgctagtcgggaagttgaagcctgttccagtagtagacgtactgctcgagaagctaaaacccgtcgtcgctgccgcaccaccgaacgagaaaccagtagcaggcttacttgaagcatcaccgtcggtcgtggcggcaggcgtcgcaccgaaagaaaaagacgacggctttgatgcagcatcgcccgtgggaactgggaaagaaaaaccaccggatccgatcgagcccgcagacgttacactcgccgcagtcacaggagccaacccctttggtgcggcagggtttggcgcctcgcacgcagtacacttcatcgcttcagggccattgttcaccatgcacagctcacacttccagcttccctccttcgccgtaaatttcgagaaggctgccgcgatctcctctttcgacttcatctcggcgggcttcgtcgctgacgatgcaggtgcatcctcatcttcatctgaatccgagtcatcgtcaccgaaaatccagttcacataccacgacatgaagtcgtcttcgtacaccttgccgtccttctccaggttttccagcgtgctcgcatgctcctcctccgaatatgtagatcccatcgccttaaacagcttcgggaactgctctgaaaggataaagtcagttccttcagccgcgatcgtgcggaacgtagctctggcattttcttcctcttccctgcgttcctcttcttcgtcgctcgactcgccgtcagactcggcgaactcgttctcatcgttctggccgtatgcatgagaaatctcgtttttggggggcgctggctcgtcggtgtgttcgtctgaatcggattcatcgtcaccaaagatccaatcaacataccaggatatgaagtcgatttcatataccttcccgtccttttcgagatttttgagcgtactggcgtgctcttcttcagaatacgtcgaaccgagggtcttgaacaacttcgggaactgatcagcagcaataaagtcctctccatcagacgcaatggagcggaatgcttgtttcgccttgttttcctcctctttgcgttcctcttcttcgtcgcttgactctccatctgactctgcgaactcgttttcatcattttggccatactcatgtgaaacaatctttttcggagacgggggcggattgattttcgacgaagcgtccaccgttggcacggttttactttcagaagcgacattcaaggagccaaagctaaagcccgtggttattgttgtgtcaactgcaccagccgatgaaccgaagctaaacccagtggcaggtttcgtgctagtcgggaagttgaagcctgttccagtagtagacgtactgctcgagaagctaaaacccgtcgtcgctgccgcaccaccgaacgagaaaccagtagcaggcttacttgaagcatcaccgtcggtcgtggcggcaggcgtcgcaccgaaagaaaaagacgacggctttgatgcagcatcgcccgtgggaactgggaaagaaaaaccaccggatccgatcgagcccgcagacgttacactcgccgcagtcacaggagccaacccctttggtgcggcagggtttggcgcctcgcacgctgtacacttcatcgcttcagggccattgttcaccatgcacagctcacacttccagcttccctccttcgccgtaaatttcgagaaggctgccgcgatctcctctttcgacttcatctcggcgggcttcgtcgctgacgatgcaggtgcatcctcatcttcatctgaatccgagtcatcgtcaccgaaaatccagttcacataccacgacatgaagtcgtcttcgtacaccttgccgtccttctccaggttttccagcgtgctcgcatgctcctcctccgaatatgtagatcccatcgccttaaacagcttcgggaactgctctgaaaggataaagtcagttccttcagccgcgatcgtgcggaacgtagctctggcattttcttcctcttccctgcgttcctcttcttcgtcgctcgactcgccgtcagactcggcgaactcgttctcatcgttctggccgtatgcatgggaaatctccttcttcggagatacaggttcctctgttttagtatttgccgtcgtgttggacgcaaacaaatgttcatgtgctgcctcagccttagaatcctccttcacttcgacattacgaataggtttcgcttcgaacggcgacgggctcttgacaaagtcaacttcatacactgttgtgtcaacaaatgcgaagttcaccaagatcccttccgtgttggtacatgaaacgacaggcaccggcggatacatgtcttcatcaacagggacctgcaacgtcgagttcaaattgagggtaaggcccatcgggtacgattcttcatcttcagcgttcatggggagacgggcttgatacttttccagcggcttccacaattgccatccatcaccattgggatctgaaacgagcaactcgatatctgcgcttagcgagcatccaacgaagaacatccgcctacgaaacaataaagcgacatgggataacaaatcagactcctccctcatcgatctccctcatcgcaggcaacgacttaccagtccagcaagaagacagagaaatactggtgcctacggttctccacatcgaaaaagccgacaacttcatccagctcaacgcattcacctccatcgaagatgcacgccatcgcggtcgtttcttcgtcgtcctcatcatacttgtggtatccagccaaaaacagttcgtcttccgcccagttgacgtggtgcactgaaccaaagcagcaagtcacatcagccacaagcaaatctacaattattcaggcacgactcaaatgctcctaccttcgaggtctcctcctgcgcagctttcaggtgggtcgatagatcgaacaatttgcaaggaatcccccgcgtacactccaatcgtgccgtccaccagaccaatcgcaatctgcgctcccgacggcgaccacgaaactagaatcgcacaacaagatgaatgaaaaataattagtcaacactcaacagctcttttacaggcgaatcacgggttaacatacccgacgaagcggcgctctgagtctcgataacagttttctctccacttagcgtgcacacgaccacctgcttctccagcgtcaagaccgccagccgctcgctagctgcgtcagtgcaccacgcaatctcctgcgcctgcagcttggtaaatgtctgaaagggagctggcgatgcctgcgagggaaattaaattattagtaagcaaaataaaaaataaataaaatttatagcgcgttggccgtaccgtctcgaggatgtgcgcgacctcgaagagcgccacggcgtctccataggccactgcgaccgtgagctcgtccggagagagcgcgatccagtaggcgatggacggcagctgcacctgtttggtcgtcggcagttcgtggatctcctcgagcgtgagcttctggccgtggtccatggcctcctgccgccgcttgttgtagtcggcgcatgcggcctccagcgcgtcgttcttggtcaccgtgaagcctgcagacaggtaagcataaatttagagattctttgtacatcaagtatcaaatgagagagccgctgctgctttgcgcaccttgctcggtcgccacgaagctgagcccgtacgcgttgccgtgctgcagcagctgcgagcgcttggacgccaccgacgcgaagcaggacgtgctgagcggcgacgagtacgcgacgcgctgcctgccggcgtccagcaagcgcacgtgctccgtcgccagctccatcgtcgccttccgtggccttgccgagaggtggtgggtttttgcggggtcacggcttccttgggtggatcacgacgccttgtgtgcggcacaccagataataaaaggagcagtcatttggatacctgcggtacaatcattccggtacaacaagttgaagtgcactgcagcagcactatcctggcacttttggcagtccacgctatctagcgtagcagatagtgctgggttcatgttcgcgcagatgtaggcatccatccgcgcgcgaatccatgcgcaaaaggataattgtgtagcaacggctgctcaatcgatttgcgacctttcgacggtggtcttaccacagtagatagatatggcggcgaagagcgacacggtcgaggtgctcgaggacagtttgggcgagcccgatgtgaaggtgggtagggggttggtggtagtggtggtgtggtgtggtggatgttgctgctgacgtgttattgcacttgcgctggcaggtcattctactcggcgactcggccgtgggcaagtcgaagctggtcgaacgcttcatgatgaacgaataccaaccacggcaggtagggaaagctcgccgattcatagcgtggttcattgcgaggttatgaaaacgttgctgatacgtttcgccagctgtcaacttttgccttgacgctgttccgcaaggaggtggggctggacggcgagaacggcaagcgcacggtgaaagttggtaggtggtccattgagccccaggtggttcaacacaagctcatgtggctatccttcctgtctaacattccagacttctgggacactgctggccaagagcggttctccagcatgcacccgtcgtactactacggagcaacagcgtgcatcttggtgggacacaaactctactatctccctgtccagcatggtgctaacaagttaactgcacaggttttcgatgtcacgcgcaaggtgacgtaccagaatctggccaactggtacaaggagctgcgcgaatactgcgagaatatcccgtgctttctcgttgccaacaagatcgacgtcgacatgaacgtcagtatgcgtgccctgcccggcgtgaaatctaactgacaatatgatactccttgcttggctcgcccctaggtcaccagcaaaaagtttaagttcgccgagacgcacaatctcgagttcagtttcgtctcagccgccgacggcacgaacgttgtcaaggtgttcaaagacgcagttgaagctgcctataaattcaagcgcgagggtggcgacttcatgtccgatgtactcgatctgcttggagaagacgcaagtaagttgccaagacctcagttcacccgccatggtagctaaagctaacttttagtgcactaacgatcatactcgtgcagaatgacgcataaccgcaacctgacgctttcgagatcaattgccaagcacgcaaaattcgtagcagttcaagttttattcaacaacttcagaatttgggcatccaggtgccgatagatcagcagtgcagctcactgtgctagtcgcccacgaatgctgttacgaaccgaacaaagcatcaacaccacaaaacagccaaaattagtcgaagtgattgccgttgtcctccccacattttgatcgttggttaacggtggatcatcatagttgaggtgctctcggcggtgggcatgttccggctgtcacctggcaaggacgcgtctcatcatgtggtcttcgacatccacgcagtgatccacgcatgctccaacatcccccacccggacgcccaagtgtactgcaagtggaagctcgcaacagcgacattcctgcacagcggtgtcaccgaaacctgcggtgtgctcagtgcaaacagagttgtttgggacgccccagtgacgatcactaactgcacactcaggctcgagcccaaaacgaaaacactcaaaagctgcaaccttcgcctctcaatccgtcaagttgcacccgcatccgctggaggctatacgcgacttggtgttgtcaatgttgatctagcagaatatctcggtggcagcaaggtatggcatggtagtgtaggtttgaaagtccccacttgcaaataccttattaacttcagctcgtcgagtatacgctctgtaggtcacacgctcgttcttgcttgatgactcgcgcctgaattcaacactaaacgtaagtactgctcgaacgatcgggacctctcatcctgttttcaattgggctaagttttgttgctctttcactgaagattacaattcagagcgagcaggtgcgcggggacgtgatgtttcgaaggtgcttggatccgttcatgttcacttgcttctcaattccgccgtaacacggatgcaactgtttgcctacacatccaggaaagcaacaacggcacctattgaagcgggtggaaatgaaccagcaagtacgactatcgtccagatcttgctattacgttctctctaacgtctagtgcatattctcacttgtatggccaagcagtccctgagcaaggaccgccgcgccagaaggcgtcgtcgccacctcgactcgttcggcagcaatcagcattgcaagcagtggaggacattgtacgcgagttgggggtaactcgagccaacaacctaacaccccagcagcaggaccacccaccggacttcagggcacccgctactcttccatcggcgtaaaagacgcatctgcgatcaaataaggttgctgagcaatcagcgcagattttgattgaagacgtgggggaccccccgcggaagaagcgccatatccgcttgcacttgcttcttgcagcattgcttcggccaggtttcgagaaatcaaactttcgatgcgttctttcagttgcttgttcgagcccgactcgtaaaattgttgacggtcaaaagagcggtccagttgctgcaggtacgccataagagagtagaggtgtcgcgatccaaacacggacggagactccttcagtaaccgttcagcttgctggagtacttcagaccgcagcaccttaggagcctcaggagaactaaatagccagtcaagtcgcttcgcagcttccatgttgacgaagcgaagcttcgtttccaaactcgcacgcacttccttgttgttcaaagcttcatcactcctcagctgctgccgcaaagactcgctgtcgtcgagaaccaggtggaattcgcggtaccgaaccagccacgccaacttttgcggacgagcaaactcggggtgagcttccatgaactgcaccgcctcgtgcagaggcgctagcgagtttgtttcgttgcactgtttcaaaatatcatcgcacaaagcatccacatcatcaaggtggttgccgcgcaacatccagtgaagagctgatgcgtactcctccttggctttacactcctgcgctctctggatagcaacacgacgctgagtcgttgcaaggagcttcttgccatgacagtacgcgagaaggcgttcagttttgtagtccgtcggcgttggttcgcgctctaaagcggagcgaatcgcaattgctccaaacttggggcagtactcatagtatcgcacagcaaactgccacatgccactgctcgcgccaatctccatggcgtactgcaacaagaaatgttccttcaacgtgcatccggcttccggcaacacctcatcagccacgatgacaatgtttctctgcagcaggtccgagagatgcgcggccatccacgagaatcccagtgcgataatatcctgaagcgctgtttgaatgtcatactgcataatggccaggataatgcagtcaaagttacccatactagcctcgtcgctgtggtacgcgcggaagcagttggccatcaagtactcgaaacggtgcgcaatggtcttaggctcatccaggaacagcttcgccatcatcaattcataccaagtgttagctcggctcttgagcgcgacctccttcgccgccataatctccaacagcgtcgtaaatcctgcattcgccttaatgtatccatccgtattcagcaatagctgacaggcgtcgtgccagttcttccactccgtagccgcatcccgttccacgctcatccccgcagctcctgcactgccgggcatcgtcagcagcagcttctgcactgcctgaaatgctgccttcgtggacgcgccggtcagcgacatggtgtcacgggcgaaaagcgacttgtagctcgagtgcgcggccaacagagcccacgcgctgggaccactgcccgccatcacgagcgcctggatggtcgtccagaaatcagcgtcctgctctggcttctgcagcttcttgagtctctcgctctcgccctccgtcttctcaagcagcgtgctgcagtagtgttcctgcagccacagcgcgaggtcgtaggccaggccagagtcggctcctcttgctccaccacggagcagcagcagctcgcacaggtgccagatagccagtgacaccttgagcaggtccaggaactcgccctcgtcctccacgttcagctccttgtgcgtctccagacggtcctccagcgcgaagatgcacgtcttgagcgcctcgcggtactcgcgactggcgcgcgcgacgccgaacgcgccgagcttctgcgtctgcacgcgcgcgaacacgtcgaaggaggcggccaccagcgtgcgcagctcacggggcatggcgtcgccgaactcgcgggcggatgaagaggaagaagccgccacccacttgcgcgcgctcttgccccacgcggcgccagcggtggagcgcgccgcggccgcatccgtcgagcgcttgccgaagacgagctccttctccaccacgggcagctgccgcgtcgcgcgcaggatctcgaaggccatcgccgccacctcgctctgctctggtccaataggtccaatagctcaataaactgcggggttagtggatgggtgggtaaggggtacattcggtggcccagtcaaagtggctgacgtcaccgattcggtttgaggagtgattgtcgcttgatggtcaagcaccatgcgggctgtgcggttgctggtgctggggaacggcgcggcaggcgccgagaagcaggcgctggcgctgggcaacaggttgagggagaagctgctgagcgatagtgcgtcgtctagatctcatgtgcgctgtccgcccgtggagtgcgtgcgcgtgacgctgggaagatcgcgcgtcattccgccggtgctgcaggttatcggcgccagactcacgcggaacccgctgttcggctacgcggagcaagacgcaagtcgcctgttcccagtgaagaggactgggcgagagctggacgtcgtcattggctgcggacgcagcaccgtggcgctctgtgcggtgctgaagcagctctcgcctacacgcacgttcaatgtgcagatccagcacccgcgcgtggctctcgcgtggttcgacgctgtggtcgtgcccaagcacgactttcccgaaggtggaggcgacgctgataacgtgtatctgacgtcggggacagtgcataacatcacgccagctatgctgcagcagcatggcggtgaatggagtgaagagctggacaagctgcaaggcaggcggacgcgagttgtctggctgctgggaggtccgtgtcgagggttttcgttctcggagcaggatgcggcgaggatggttgaggagttcgtagcggcgcttcctcgtggtgatgatgtggcggtgctcgtgacgttctcgcggcggacgccaacgcatgtgcagcggattattcgacagggactgggtgcaaggttgcccgcgccaggacaactgctcgtgtgggacggcacggagcaccggaatccatactacgcgctgctgtcaacggcgtcctgcattgtgaccacgccggattccatttccatgacgacggaagccatcgcatcgggcaaaccggtgctgacgattagcgttgagcatagcaaggtaagaaacgtgttgtcatactgtacgctaggttgtgaagggtggcttgttcccaggttgctgacgctgatatgccgtggtgggtttgagtagggcaaattccagcgcttccaccaggcactattcaagtcgaacgctacagcgccgttctcgagcgatgcacttgcaactgccttgcatcgagctggcaattccgacaatcgtgcgtgtgaagcggcgacagcagcgttggaaaaagagatttcctgtgtcgttgagggcatcgctgcggaagttgaagctacgcttgaaaacatagaggaagtctcgttaaagtgaaaacacacgggttcaaagtagtagaatgcatatttgattcgtttccctcagcgtctcgatcagtccacatgcatggtgagcttctcagatcaataaggttggcaggaatgtgatatgaacggaaagatatgcagcgctgggttggtagctaacctcagtgcacaggggcacacagcagctccaacagcttcggggtagaaagttactcgtcgtcgctctcatcctcgctctcctcctcggcgttctccagccactcgatgaagggctgcagcaaggtcttcagcttagcagcaagctcgtcagtgacagcccagtgcgcgtactccttgcggacaccgttgttggcccaggccactaggcactcctcctccagcaggtcctcgtcgtacagaagcttcagaaggatagggtacgaggtcaagagctccgaatgctcaactgcgcagaagtgctcagtcagagcaagcagctggtactgcgcgtgctgggcgtcgatgatcttctcgagcacaggcgcaaacttggcaacctggttgctcgagagcacctcctttgtgaaggcggagcggaagaaaatgacaagacggtcagtgacaggaagcgccgagtacgtctgctgacggcacagctcctcgaagatctcagactccgagtggctctccttcaggaatcgctgcaggttcgcaacggccgaatccagggcattctcgtcgtccacctgcaggttgtccagcgtagccacgacctcctcggcggcagaagcctccatagcagcagcggcagcggcctcgatagcctcggcctcagcagcacgagccgcaacagcctcggcggacaggtccgtgtgccacaccacctcgtcgtcctcgtcgtcgcccgactccttatccgagttcttctccttgtggtgttttttcttcttgtccttcttatccttcttgtccttcttgtctttcttctcctttttgtccttcttctccttcttctctttcttttccttggtcgcagactcgtcctcaggctcatcgtgggacttcttgtccttcttttccttcttctcctttttgtccttcttcttcttctcatccttgcttccacgcttagcggcggtgtgttccttgaagatgaaggtcgtgagcttgtggttcatgtccacgggctccacagcaccacaggcgtagcacttgtggaagatcagctggcccttgaacttgtacttggtctcgggaagacggcagcccgggcacagcacgaagccctcgatgtacttggacaggtgctgctgcatcatgccagcctcgaaggctccgttcacaatggcacggtccgtcttctcatcgtacttggactgagcaccgagctcgcagccgaagaacttgcacacctcggcggtcgagcggtgcagcgacgtggcaatgtcagcgcagttgacaaccagagtcttgatgccgttaccgcggccctcaattttggcttgaagacgcggcatcttgtagcggtactcggggtcatcgaccggctgggttcctgcaatgttcatgaacgacatcttggctgttgggttgcttggataagtttttcttgggtctttttcggcttgattggggaggagaggagggctcttgattagctaaagaagagcgtctggtcctgtaacgtgagcgggatcacgtgctcggctgaaggtatgggaatggaatggtggcggcggggatgatccgggggatgacgcacagcttcctgtctctttcgtttccaggtcgacgcactactcgaatcaatttggtcgcacgggatttgcaaacgcatgcactgtagccaggtcgggagggtcgccgggcgctgggggtcagaaaaccggagctgtcgagctggggggcgcgagctgctgctttctctttggacgtcgacgcttgcgggccaacggtgtctttgggaactgacgaaagacaccccacgagtggtccagacagaaactgacagcgccagattggttgaaatggcggaatagccgcccatactgaaagcaagagcatccaccttcgcggccgttgattcgcgcagtcgcagagggaaaacgattcgctaaaattagctggaaagccctgcagtagggaatagtgcggtcttatcctgtcttatggcatcacaggccacttcaaccagacaggcaggaactgcaatggcgaaatgctgggctgacaaagttgacgctcgttgtttgctggtgcttatatgttcttacgtctactacacgttctctaagggttagcttgccacgcttacggcatggagtcctccgggcgcttgatgatgaccgtcttgttctccaggtagttgcgcaggcccagctcgccctgctcgcggtcgagacccgagttcttgaagccgccgaacggcgtgttagcctcgatgatggcgtagcagttcacgtacacggtaccggcgcgcacgctgttggagatcttgatggcgttgtccaggttggacgtgaccacgccggcgcccaggccgaactctgagttgttggcgcgctcgatgacctcgtcgatggtcttgaacttgatgatggacatgacggggccgaagatctcctcgcgggcaatggccatgtcctcgttcacgtcggcgaacaccgtgggctcgatgaagaagcccttgtcgccccagcgcttgccaccgcacaccaggcgggcgccctccttcttgccggactcaatgtagcccagaaccttcttgaactggttgccgtcgatctgcgggccgtgctgggtggtcaggtcgaacgggtcgccgatcttcatggcctgggcagcctcggccgagcggcgcacgaactcgtcgtagatgccctcctgcacgtacacgcggctgccggagatgcacacctggccggcgttcaggaacagacccatctgcgactgctggatggccaggtcgatgtcggcgtcgtcgaggatgatgttggccgacttgccgccgagctcgagcgtcacgcgcttgaggttgtccacgtgcgacgagcgcatgatgtgcatgcccgtctcggtggagcccgtgaaggcgatcttgtccaccttggggtgctgggccaggtgggcgccaacggtggcgccgccgcccgtcacgatgttgaccacaccctcggggaagccggcctcgacaatgagctcggcaatgcgcagggccgtcagcgacgtctgctcggcgggcttgagcaccacggtgttacccgtggtaagagcgggggccagcttccaggccatcatgatcatggggaagttccacgggatgatctggccgcacacgccgacgggctcctgcttggtgtagcacaggtaggggcccgaaatggggacggtgctgccgtggatcttgtcagcccagccggcgtagtagcggtacacgttgagactggcctgcacgtccaggacgcgggtcaggaaggacggcttgccagcgtccagggcctcgagcttggcgagctcctcgccgttctgctcgatgaggtccgcgaggcggaacagcaggcggccgcgctcagcagcgtccatggtgcgccacgggccgttgaaggcagcgcgggcagcgtccacagcagcgtcaacatcggcggtggtggcctcagaaatagacgcaatcttctcctccgtggcggggttgaacgagtcgaacgtggcgcccgaagccgacggcgtgaacttgttgttgatgaacaggttggtctgcttaacctgcacctccgaggagaactggcgcgacagcaggctggccgacgaggccttggccgtcgtggcggcagcggagctgcgggcgatggtgcggggcaggcggcgcaggatgtggcgttgcatggctttcgagcggagtccggagtgagctggagcgcgcaaaatgcggaatgacccgcatcggggcaggagaggaacgtggctgatcccctcgccagacagatctcccgattcctatccggttgccggctgacgcacgcgtgcttgcatgctgccgacccgaaagcgccgccgattacaaaacccaaggcattcatcgcgcctttggctggactggcgggacccatgtcaacgagcaaatctcgagtggcgagccagctggagcttcaagcacttgctctgcccgtccgccagaaccctcctcggcgcacacatcaagggggtccttgaccccacgcaccatttgtacgcggtacccgcgccgccgagcttcttcgagttccctctcgtcttcgcgagagcatttggtcgttgcaacttgacaatgcgtgcatttgctggtgttctggatacccgccgcgggttttgccaactttgttgtcgctgcatttaggtacatgttgcatccctgtaagcgtaagtgcagatgagctgcatgtaggtgtgcctgagtatccgtacgggcaagcatcacagagactgtaaaattcttcgtatgtatcatgttgttagcagacctcatcaccacgtaatcgcgctttgaagaagtgaagaacttttcaaagtgcatgttcaaagtttatagtaagccattggaaagcctcaccgatatccgcaatcggtcggtccgactcggatgtgcttgccatcatcgaagcggcccgcttcgagctgaatgggttctcaagtgtcgataccgaccgcttcgtcttgccttcgacttgatctacccagctcatttcgattccaatcgcttactcagggtacataccggtacctaccgtggtgtgacttcaatcttgccgtcacatttcgtctaaatcgtggaggacgaatccattggcggcggtggcccgctccggagtctgtagccgtgcagctcaacatgagacctcggaggattcgcgagaggaccaggatttgctggggatgcactttttgacgagtcttcgcctcatgtgagttggcgagtcgccaactcacatgaagtaactttcagtcacaccacccgctcaggaacagtgttggcaaatggatggaaaccagtccagtgctgtttgctggaaaaagagcaaatgacctcgcatgccgcgaatgcgctgtccacgggcacattattaccacgaggcgtctacacctttcaaagcgtgatcaaaagagcccgcgctattggggtcaaaatacagtcctgtgtacaaacatgtaccatggcgcttgagagaccattggtgtcggaatgggaatcggtcgcttaggcggtgcctcaagtgaggcggtctcgtcaatacatgtaaaagttgatccatgtcactacattttacacaaatgtgcccgcaggccttaccacgcagtcccgccaaaagacacgcgggcaccccaaacgtatcggaacgcctcacgtatcggaacgccttacctgttcatccatcgaagacgcgattcacttcaactgaacttcacttcggctttccacaactgtcaaacagagaggagctcgccctcaatgccgaaatcgtatccacaatggtgcgctttctcaaaagcgaaaccgaaacagccgggttttttataaaccggagtataccggtactgaactgagccgtataggcgtaatcctaggcgttctatacctttttgcagtgactcttaggacaacagatgtacggttggcgcctccaccttacgatatgcttatctagaaaacaagtatatctaccaatcccagctcgactaggaataccgctcgttcattcgctgaaaccccttcaacaacaacgcacgcgaagcagcagccaaggtcgatacatggcggaggacatctaccgtcgcttcttggaagccccgctgcgcctcaaggcgcgcaagccgtccccttctccgccatcaacaccaccgccctccacacagcactatgacgcctccaggcccagcccttggggtgattcaccagcgttttccacgcgatccaaagacgtcaagaaactccggcgaaaagtggccaatatcaggatttcagccgaagacgcagtgattccgcgggatttagatgacgaattcaacgcggcagaagcctctgacacggaagacagcgtcggaacaggatcggcagcttcagggtcgaaggagaaacaggttaaagcgggctcaaagtctttgctaaagaagaagaaacgcgtcactcgctctgtgagcatgacagacgaggagacgggggcggaatttatggatacgccgacaaaagcgtcgaagccgccgaagcgcttccggaagtacagtcgggacttgggcagcggcaagaaggcgaagacgaacgcaaaggcaaagaaaaatgtcgacgccttctccttcagtctggaaggcgctgagtcggaggatgagacggagaaaaaggaccatgtttcgcaagctaaggcggtgtctgaggtgaccccacggagaaaaagctcggtgacaatcacgttgccgctgcgtcgaagtcgacgactccagcatattaaagccgagtcgccgaaaccagcagctccagcagttcagccgccgcaacaagctacggaaacagcagatgccccaatgcaatcagcggaggcacccaaagtggcgtcaatggtaccggattcagcgttagagcccccaaagccttcagttgcggagatgccggtggatttggtctcaggctattgcgagtctttgctgtcaactgacactatctcgggctgcttctttgcgctgtcacttaatgctcttcgtgacacgcagctcacgcttgggtcaaaatccgagtccagtgagtcgaatccgttcgaaagtgtctttacggtttgtctcggtatcgcggagtgcgaggggctagcgcagcgttccttcccgtcgaaaactccgaagtcgacaccacccaagtccccaaagtcgccgggtgtcgaagtgacgagaccgaagagacgaatctcgttgaaggacattaggaaaccgaaaaagacgaaaaagagcgttcgcttccgaagctttgacctctcgtgcctgaatctgcagtatgtggaggacgagcacgttgccatcatggtggatcagattttgactcgctacggcactatcatggagtacgtcgaaacgattgatacggaggctgctgcactagcgacgcaggctctgcgcgagcttgcgcgtgtgatggcaagtccgtccgaactgtacagcagcattcactccgatggtgatgatgcggtgatggatgcatttgagcggatatacaggcgcacctacggtggacgagacccctacagccagcacgagatccgagtttgtggcgaatactttgctcgtcaatttgccaacttactggccccgcgcacttcaccgtcaacaacgccccagtttttgcagggtgtattctcctcgctagcatcatccacgattcggttcaagctgcgcgtgttgtttatccaaagcgaagactttggtgagaacggaagtggtgatgaggtggtcgaatctcgagagcttttagatgaagatggcaggccgtttccagtaatggcaccgtacgagcaccaggaccttggagcagctattcactgggcattgcaggagtcgtacctgtattggtcgctggtgcagcctcttgctgatatgatagagaacaagaagaatgacatttcgacgagtcaagagcttgatgaggactctccactaaagaaacacctggacgaaagcgcggctgaagatttggatcacatggagaaatacgtgcttgcccgacgatttctccggtttcacctaactaaatcatggcgacgcagattaatggacactgacaccgccgaaatgtgggcagcaatcgagaaggtatgctcactagctaagaggtacgtagcgattgcgatgtcatgggaagtttatgcagcgctgtagcattaacacttccgttgtatggctggcaacttctacctagatttcgctttgaagacgaagctcatctctatcctctggtttctgtggaggagttcgttgccacattgacccgtgaagagcccacacttcagcgaatggaagagactttgcaaacgttttacgagcagaaatacggtaagcaagccattttagacccgactaccgctcttggtgtgctcattagctctcctgctttgtctaggaataagcgccttgaacccagagccctgcatggaatgccacaacatgatcaccagagaagaaaaccccatgtccatcagatgcacttcgtgcgctcgccggttccacttgggatgtctgcatcttcctgagtcctttgcacagttcgcgaatcactacacgtgtccagcgtgctttttgggtcgtggtggctactgatgtggggtagcaggaatgctagacgacaaacttggggtggaaactacgtcgacaaagtgaattagagttgacatccaaatgctacaccatttccctttgatcacaatcactggtatccttgccaacgttccgactgcctgatcatggaagaacctctgcttccttgttcttcttcttcggtcgcgggccgggctttcgccgcccagtaacctcctctgtgtagaacaggtcgagcggtgtcttcagtgacgtgtcaagcgtgattgaggatgcatccacaggccacggcgtgaaggcagtagaatagcacgccaggtaattctcgatcgagttttgcttggtgtcgtaaagggaatcgatacgacgctgctctagctcagatgcatggatcgcgtgcaggcacgggaactgctgatcttgccagtcctggcatgtgcactcccagtcaacgaggctcacgtggcgccagctatcgggaattttcaggcgcgtcgggccaaggtatcgcaccatgtacagcccgttcgcacaagggatcgactacaattcgaaacacacacaaaaggtaggtcagcagacatactcaacaaagaatcatttcgcaccaccctacctcgcagcgttgactgccttgcaggatctgttgcagctgtgcatctcgcatcggaacaagttcctgcgccgggcgtagcttcactgattggcgccgatggtggaagttctctgcgattttcataaagtactggttgaaggtgtagagtggttgggagctcccaatggggtcttcgccgaaccagccaatgtggctggcgcttgcgtgttgtggagacaattcgtcactcccaagagacatcgacaggtcggaagtgagctcattgaacgtcggtcgccggaatgcctcgaggaaggcgtatttcacccaatgtgcacgatccaactcgtccaaatacgccaccgctgcctcgttcgtgcggaccagagccttgcgaagagtgtcatactcagtctcgctgtcactgcgcgcgaggtcgaagatactctgcttcttctcgggtgtcatcgggatcttcttcaccatcatcagttcattttcgacaacacggcgcatgcagtagtggtggctcgcctgaggccagaccgttttaatcgccggttgcaggccgcgcgtgcgccctgcaatcaccgtgtactcgttccaatcagccgcctgcgtggtctgcaatgcttgcaagaaccactcccagttctcttggttctcctcagccacaagagcgagcgcgaaagtcagcacttcgtcgttaaagtccttggtagaggccttcagataaacaccacaaatgacgtcgtcattctcgtcgtcctccagcttccccacgggcgtttccggcagctcctcactgtgtgtgacgtggtccagggacacgattttgcggcagtatttcacggcattcagcgtagcacttgaaatgaacaaggcccgcttaaacgccccgttctctgtcgtctcaacctgcgagagtgagcccgggttcttctccgcgacgatctggaggtaccctccgagcttctggaacgacgttctgaccttgctgatcctcgcttcctgaagctgccgcttgatccttgacgccatcatgtggttgatcgtgtgtccttgtccgagcaggatgcgtcgaatggtcttgccgtccagcttggccatcaccacgttcgcggccgggtacttgctcacctcgtcgatcaccatccgacacagcgccttcatggacatggtcgtgttccgctgcgacttgaccttctgcggcggcagcggcgtgatctccatagcggttgtacctgcaactgcggaggcgtctgcagcagccgcatcaggccccgcggggggcgccggcagcagcagagcgcctgatcccgccccagtcggcgtcgagcctttcgccgcagccgctgcagctgcagccatagctgccggtggcatgagcgcttgagcggcagctgcggacgcggctgaggtcggcgggggtgccgcgcgccagccgatgaacttgtagtggttgtgcaggaagcacgcgcgcgtgatcttccagttggtgtccttgccgtagccgttgatgtagaacggacactgcagcttggcggtgggcgtctccgggtcgaagaactgctggccgtgcagcttcttgcagcggtacttgacgttgccgccgccgttggcgcgcgtgctcgagcccgacacgaagagctggaagccgcgctgcatggcgaactgcttgcagcgctcctgcagcgacttctggctgccgaacacgtcggcgccgcatcccgcctccttggtgccgcccttcttctcgtacgcgatgccgaactcgggcgcgcccgagtccagactcacgggcaggtgctcgcgcagcaggcccagcttcttggcctccaccaggtccgtctcgtccaggcggttgtactgcgacagcgcgggcagcgccgtggcgggcacccgcggcttggacgcccgggaccgggctggcgctggggctgcagcctcgacctcgaccacgaccgtctccgggaccgcttcctcctcggttgctgccgacgttgtgatgacctcctcggggcttgatgccatcgccactgacttacgtgtgaaggtctcagtaggggggagagcgagaattccccctatagtcataacctctcgttaatgcatgttgcttacaaagtcaaggtaaaatcaaactatctctaatcagtgatttcaaacaattgatgtactgaagtacgagtattattatctaaagggtgctaattactcagtgctatatgtaccgtttaatcggtacagttccatacagtgattccttctaaaagttatattgtgaacctaccgtatagtcttagtccttggcgacgtttagtcgttggcgacaactactgccattgcgattggtcagtacttttcatatgggatcggttatttttacgcgccattggttctaaaagagcagtatcgcattaagcttcagcgcgggaaggaagcatgggtcgaccgtgcatcacaggctccagtaagcgccgaaagcaatacaaacgagttgccgtggcctacggcgacaagcgagacgtcctcaagtttctcaacaagggcaactccatcaaggccaccattctgcacttctacgggcagctcacacgaaaagaccacagagcaaaagaaaagcagatcagcaaatggaaaaaggcctccgcttcaatacagtcagcgtgtgcatctggccgagcacgccatcttaactctcggaagctcggagacggcaccgtcttgagcctcgaggcagaagaagagatcgtccggtggatcaacacatttaggaaggaaggaattcctgtgtcccggttcatgctgaaaacaaaggcaatggaagtggctaaggaatctgatattgctcccgacaagttctccgcctcctcaacttggatgaagctgttcatgaggcgacacagactgtcgttgggcacaagaacgcatcaaggccaaaccactctcaagtcgcggccgaggcttcccaagcatttcgcgccttggtacttcaaactgctgtcgaacaaaactgcaccaaaatattcaacgcagaccgaacaggtgcgaaaatgttttatttcttattatgatttaatgctagacgtctaacatactttctagctgtattttttgaatacgtaccgaagaaaactatctcagcaaagggcacgaagacggtttggatcaaatgcgctaataaagacaaacatcgtgcaactgttatgcttttagcagattcggatggtgtaaagtgcgacccattcattatattcaagacgtcagacgccaagacggaagcaagacgcgctgagaacggtgagatcagaaatgggttcggtacaaccatttggcctgaagtgaaaaccctgcagaaaacgtttccctgtcggatctttggaaacaaaactgcgtggtggaacgcggatttatctctaaatgttttggagtatcattttgccaaccgtgagaacccggacgacaagctcttgctgttgtgggacgattttagcgcgcattggacgaagaaggtaaaagattatgctgcctcgctcaacgttgtcctactgaaggtgccgccaaagtatacgtatgtctgtcaaccggcagatatttcgtggaataaaccttttaaaggtttactacgatcgctttggattgaaacactgagcgaacaacttaggaagtacaacagtggagaaaagtcccgacaacaaaaaaggagcaagctcgctgcagatattctaagcacacgcaagcagtatgaccagcaggaagccgatcgcagagtcgccattctccgggacgaatttaaagagaagcctttcgctttggtcgggccgtcgcggcgggacatcaccaaatggatcatgtcaagttgggacgggttatcacgtgaaacaatcgtcagcggattctcacgcgcggggctactgatggatacacgcccaccggctattgacgcttgtgttgaggttgatacagacgcagttattgcgtcactgcaaatgcacaacttagctgaaggagaaatggactctgacgacgatatcggtagcgacagtggtggcagtgagggggacgacagctcggacgatgataccggtagcggcagtcacagtagcgacagcgataatgttgaggatgaataataaaacggcagcttcaatttgataattagtagttgtaatgaccagatggtgataatccatgtccggaggttgtcgcctaggactacgattatacggtatttggtgttctgcggtcagcaacttgcaaatgtatcggagactgcagcgcctcggcgggcgcgtgcgtgggcgcgcgtggagctccagcgccaagcccgcgtcaactgcaggcaccaacaatgcagcacagactggtgccactactgtcggcgcgtccacccgctccgcgacgcccggcaccgtgcgcgtgaccaaagggttcggcgccgacaagcacgaggcggagctggactcgaccatcgcgcgcatcatcggctcggactggggcgaccgctcgcaccagcccgtgtcgatggccatgcgtatgtactggatcatcttcggtctggtgctggccaacggcgtgttcacgtacgtggccggcaaggacgagtcgttcctggtggagaagctcaagaagaaggcggacgagaagctgggcgtcgaggaagaggagaacgagttcgaggagatggcgggagaccagcagcagcacgaggccgtgaagacggttcagtctgccgaggaaaagcaggcgcctgcggctgcctctgctgctccggcgacgtcgatgctgagctcgggcgtgacacccgcgatgcctttcatgtcccctggcatcaactcgcaggccagtgccgcacgtcgccccaagacgaaggcggaactggagcagcagttggcgcagctgaggctgcagcaggagcgtctgcagaagcagattcgtagcggtgaaggagtcatgaaggaggagctggagcaccatgtgcgcatgatcgacgtgcagaaggaccaggtcaagcgccacatcaaaagcttgtaactaggtagacgatgctgctttttggaatgccagacacggaatagagctgtgtgtctagcgaacgataaagccgcctcgccttcttactagtgtctatcgcgggtgacagcgatggagacagcaccgcccgctgctaccttcaggacctcttggcttgcgtctacgaagaagtccaccttctccaacgagggacggttggtcttgtcaccatgacctgcagtagaagaagcccacgagtgtatcagcattctggcccagtgtttgtattgaaaagaatcgagaaacgcaccaaggttgccgtgctctccccacccgcacgtgtagagctccccgtcagtcgtcactaccatcgagtgctcgctgccacacgcaatctgtcgagcagtgtgagcaaacgtgactagttggggctcgctggcgttttcaaaccctctaagacccaactgcccgtggctgcctttgccccaggctaccagattgccgtcctcggtgaggcacaatacaaagtgccacccgcagccaacctggacagtgcgaagccctagatgtttgtggcgcgggtctgcaacgcgaattggtagagcaaccacttgcttcctcttctcactggaggccccgtcggctccagaggctgccgtttgcacacctaattgaccgtgtcgattgttcccgcaggtaagcacctctccacttgaagaacgaaagaccgagtgctcccacccgcagaagacgtccctaatagccataccgttcacgccgtcaatacacttgggactttcagtctttaggatatcattccccagtccgagttgaccatgccgaccacttccccacgagaatgcctgaccatcggcagtagctagaagcgaatgcttccagccacaagcgatacttgcaacttgcaaccgcggaggcaattgcacaatcaaagcagctttctcgacctcatcaccaccagagctctgctcgtgacccaactgcagataatcattcgagccccacgaaaagacccgatctcctgtgctgtcatcggatacgatggccactgtatgccaccacccgcatgcaaccagcttggttttctgtcacgaaggcaacacgaaaggtttagaccttggaccgtactacgacccgaggagcaccacgcacattgtaaagtgtcaccggctcagtgggggcgttctggaagttttgtgtttgctctgacgtggatcgtcctagctggcttcgatcgtccgcgccccagaggaaaaggcgaccatcctcgcggatgcctgcaaagctcagcgtcagaggctggaaccatttgacccgaggacacttcacctcctaccaacctgcactatgacagcctccggacgtgatagactccaactccaattgctacagcagattgtgtgacgttgaccagcgcaaaattagtgtaagttttggccatcgaagccaatagaaaaatcttagggtgcactttaccttcgcattatcccaacgctgaggaagatcgtagtcgtcctcggttcctactccgagctgcccagttccaccttggccactgcagtcagactaccgctgccgctgaacagcgttggatgctgacacgcacctgacccccacacgtacaagcgcttctccatcaccaccagagcttcgccggcgtgcagcgcttcgactaatggccaatcaaacacttccaacacacagcatggtgttcatgacgagcgactgcgcaggtaaagtttttctcgctttgctcatattgcatagtgctctgcgatcttctcagctattgtttgtgttcttgataatgttctgctaggcttgtgctcgcctagtgccgggcaggtatctcacttacggtggtggagacgacgcgcctcgttgaccatcagcccgtagaagtgtttatagtccatgcaggccagcaagtggtccacgaaccaggcgtacgtgtgctcctcgaagagcgccgtgtattgaccgtcgtgaatctcccggcactccttgaaaaactcatcaatcgtcgcgccctccgactcgacgaagtctgcaacagcacacggtgcccgagacaacaaacaagtcagagcttgattcaagtcaccgcgcaaacattccaccgcaccacagctcgaagcttcttacccgacagctcctcctcgaacaacttgaggtactggtcatgcagctccttgtatctacgcgaacggatcgagccccctttgcgtcagcatcaaggcaagccgaccccttcatcaatcaccaactacaaccgcaagcgtatgggacgtactcgtgcttgtgctcgacgtcaccgctcttcgcctccgttgcgtcattgaacacatccgcgtggtccctgtggatacagtaggcgccgcgtcacattccgccgccacatggaccacttcaacctgcggaaccagccgcgcgaggccgccagacggacgtacctggcaaagttgtcgaacacgcgctcgaactttggcgacgagcagaactccgcggcgcgcgtgatgatggacgccgccattccgacccagagcagctcactgcaactcccgccgaagtgccgcattgacgcgacctttcgcgggaaatggccacattcagtgactgctgccccaatccgagccaccgactgcacattcgccgagccgggccgttaaaagcccttttcagccaatacacagccgtcacggcgggcgaatcggatgactggtggcggaggcccgtgtggtccacaagagaagagccaaggcccttcaactgcggtcgccagacgtaaaacgcgatttgccgcgctcccattggctgacgcgcgtcatcaacgggaactttctggaaacgggccagtcacggcgcgagaaagctcgccacagagccagcgtcttatttcccagcgcttgagaggcccgctgcgccggcgccacgctccgccaatgatgccagtctctttctctctctttcaataaaaaaagaaaaaaaaaggtttccccctccgccaacgacaggtatgtggctggttgcatgcatgctcgtgccccgcccggcgccccggcgcgcggccgagcaatgcaacctggctggctggccggatagcgctgcgtcttaggcagcggccgcccaatgcgcaatccactgaccgtgtactgtgcccgtgtttgcttggaacttgcagcaatggccaactccgctacttccccgaccaacagcccggccactgccccggccagcgccgctccggccgcggccacgtcgacggccactgcttcggcggcctcgtcggccacgggtgcggcgcagccgttccacacggcgtcgctgtacgtgggggacatccacccggacgtgacggaggccctgctgttcgagatcttcaacgccgtgggccccgtggccagcatccgtgtgtgccgcgacgctgtgacccgccgctcgctgggctacgcctacgtgaacttccacaacgtggccgacgccgagcgcgccctggacacgatgaacttcacgagcatcaagggcgtcccgtgccgcatcatgtggtcgcagcgcgacccgtcgctccgcaagtcgggcgtgggcaacatcttcgtcaagaacctagacacgtccattgacaacaaggcgctgtacgacacgttctcgctgttcggcaacattctgagctgcaaggttgccatcgaccacaccacgggcgccagcaagggctacggctacgtgcactacgagacggccgaggccgccacggaggccattgccaagatcaacggcatgctcattgccggcacggaggtcttcgtgggccacttccagaagcgccaggaccgcccggacgccgacgactggaccaactgctacgtcaagaacatcccgacccagtggacggacgccgacctgctgaaggagttcgagcccttcggaaaggtgctgagcgctgtggtcatgaaggacaacgccaacccggagcagaaccgtggcttcggcttcgtcaactacgaggactcggaggccgcccacaaggccgtggacgccctgaacggcaagtcgtaccccgccggcgagggcgtggagaccgagctgtacgtcggcaaggcccagaagcgctcggagcgcgagcgtgagctgcgcaacaagttcgagcagctcaagatggagcgcatcaacaagtaccagggcgtcaacctgtacgtgaagaacctggacgaccagctgaccgacgacgagctgcgtgaggctttcgccgagtgcggcactattacgtcgtcgcgtgttatgcgtgaccccaacggaaactcgcgtggcttcggcttcgtgtgcttctcgacccccgaggaggccaacaaggccgtcgcggagatgaacggcaagctgatctccggcaagccggtgtacgttgcccttgctcagcgcaaggaggtgcgtcgcgcccagcttgaggcccagcacgcccagcagcgcgctggcatggttgtgggccgtggcatgcccatgggccagccgcccatgtacggcgctgccccgatgttctacggccagcccggccagctgccgccccaggcccgccagggcttcatgtacccgcagcagatgatgccgcgtggcgtccagcgtggtccgatcccgtacggcgcccgtgtgcctggcgctccggccccgggtggctacccgatgcccggctacggcatgcccatgcagcagcagcgcggccagccccgtcgcggccgtcagggccccggccctcagggcccccagggcgcccctgccaaccgccgcaacttcaagtacacggctaacgctcgcaaccacccggctcgcgatgtcccgccccagggtgtgatgccgcctgccgcccccgtgcagaacgctggccccgagccgctgacgtcggctgccctggccgccgcctcgccggagatccagaagaacatgatcggcgagcgtctgtacccgctcatccaccgccagcagcctgagctggccggcaagatcacgggtatgctgctggagatggacaacggcgagctgctgcacctgctcgagagcccggaggccctggaggccaagatctcggaggctcttgccgtgctggaggcccaccagggctaagtcgttggccattggccatcggcttgcgcgggcgtcttgcaggatcgcgtgtttggtcatactcggttcggcaaggcggcagcgggcttcctttgcgtacgcagggaagtagagaaggagaggttcggtgagttgcggctcctgctttttgtgtcgtcgatgttgagcggttgctttggtcgtcgttgcttggatggttggtggaaggaatacactgagaatatgctcaagatcacggggaaggcacaattggtgggggtcgtaacttaacgaaaaacattggaagagatgaaccagacgctctgtgacccgcggccagaagacgttgctttgcgttgcctgcctgcctacctcttgcttctttgagcacggcgtcccgcgcagctccgcccattgcgaacacatgcagtctgtgacttgcagatattttttatttttcgcgacggcgtagatagtttagttttgcattcttaatcttttcccttttgacgcatgcatgcctggtgtctcttgcgcctgccctgccctgcttcgcctcatggaaacacaccatcagagacgacatagtgcgagggcggaacatcagcaacgttgaagtgagcacttcaagtacagtacgtgtccagcttacatggctacacgtcaacgcgatgtacgtctatgctgttatctgtgtccactgacgcccgccgtattgtccaatgcctgcaacgttgcgaactgctggcactgtagacttgcctcgaggtaaaagtccgtcagtttgcggcttgattcggcaggggtggacgaacgtgacgaacacgccactgcctcttcaccgaaacatgggaacacagtcgcaaggtcaccgcaaaagtcagccaagactccccatcgactgcgcagcacgctccaagcctcgccaaaacttacgctggtatcttcagcgttcaagtcaagaagctggcgtacagcgggctcgctagcagcagcacttcgcagctcgcggtgctgagtctcaataatagcaagctgagcatccgagaaagactcggccagacgcgcgcgatgcacgcgaacaacctcctggaagtcggcaggatgcaacagcgccgcttggtgcggtaataccggcgggaaagcgctcagactggcggtgctgccaactccatgcgtctcaagcttctctgcgaggccgtacagactatgaacgagctcgagcattctatcagcaacaccgaccacgagtttttggcgctcttcagatgtgagcgtgtcaaacatctcagcagcccaactgcccgtaccccggacaaaagcgacaatcgagtgaggcttcacggcgaacatgccatcgtcggaggcgatcttgtctccaacgccgctgtgatcgcgtagagcagcacgttggaactcgggaagcggtccttccacacccacatcctccgacagcgcaagccgcaacatggagattcgctgaggttgctgtgacatcagcgtagtgtatcccccttgaagtccagcacgcgtcttaacggcgattgagccaacctcgagcataatcttaagattgagccaccacactgcaggtggcgtgactgttgcattcctgcgtgatagcagccgctggataggcacccttgcgttatcaagccagcggagaacttctatcagcttccaccatgacatatctgcaatccggggacacgatgtcactgatgctgcagacaactcctcagcatttcccgcactaacttggcgttgcagatacgctagcaggttcgtaaaatgcccatgccattccgcaccatcggcgaagagtactgaatcaaagaaacgctgcagcagcacgtctaatgaaggccgtccacttgaaacacgaacaaatccagcaactgcctgcttctcgattcgtcgggaaaaattgtccaggacggagcttaccgccaaatcagctgcagacccagtagccccagccagttcagtggagcagccgataaccttccacagccaacgcttgtgtaaggccaggataaacttgttggttgtgtcgaatagaatctcaccggtggtactcggatctccttgtgttgtgacaggcagcgtgagtaaatgaaataccttgatcttacccgagcaatacgcgcgtaaccgcacatcaataaataaatgaggctcagtttctccaggtcttcgtcggtctatggtgtgcagactcagggagaacgcccaactgcgttgcatgactcgggaaagagcctgcaaattggtgcccacaacgactcgagccatacgcgctactcgattgccatcatcagatatcctgcttatctgttgactcaattgtggttgacacacagccgctgcctggtcaaaactgagccccgccgataacaacgtcaccactttctggaaaagctccaccgaccgcaccacagcacgatactctgccgtaccatcggacctctgttggtcttgcatatccacccgatccaacgtggtctcaaacagcggcgagcccccatcatccacatcctcaactcgaaacaacacttcccccaatgccacgtccaccacatctcgatccaacaggaacaccaacgctttctcccgtcctccatccaccactgcctctgaaggcacggaagcttccgaagtgtccacaaagccccttcctacaccaatcactggaggttgaaccataacaattggagatctaattggagactgcaccactgccgccgctgcaacagcaacaacctgttcatcagactccaaagctgaagttgaagctggcgaagcaggagccgacatcgccgcctcatcgacagcattaccagcttcatcttcttcagctactagcgtctgaaaaggtgcagcgaagtgagacaccgaggctgcctccgtcgtgattacttgagtcgagactgcgttgtccaaggacctgcgtggctgctccctcttgggcagcgccctcactacgccgaagtagctctgcttggcctcaggcgtcaggtcttggtactccttccaccgcaccgggtgcatcatcgtcaggtgcgacttgtagttgtccgtccggaagcacggcccgccccagtacttgggcttctgcgtgcgcgcacgctgccgagcggtggccagcgggtcgtcctcgcgcccgaaggcggcgcagaacatgcagagcacagactttacagcgctgttctgcgggtcgcgctccaccacgcgcacgccgtacaggacctcatgcgccttgaggaagggcacgacgcgcttgggccgcttccgcgccggcggctgcgcttcggtcatcatcccttgtacaacagtactgctaggttgtatggtgtggtccacagctctcgacattcgctgtgggccacaccattgtaaaacttgccacagcaaagcttgaggaccagaggcgacgatggcgagtgcgatgcgagcgagtttgatgcgcgcggcggcgctgcagctgcggcgccagaccccgcagacagcggctgcgatgcgcgccacctcctacccccagtcggcggtggcgcagacgcagctgcgctccatgagcgtgttctccaacatcaagaagacggtgtcgggcaagctggaggagcgcaaccagctcaagcagggtgggttggcaggcgccgttcagtaggaatattctaccggagagaaagagaatgggctctgacagtagtgtgctgctgctgctgttgttgacgcctgcaggcgaggcgtacaagcagcagatgatcgagctctcgcagaaggaaaagttcgacctgaacggcttctacgaccacctgaaggtaccaaacaattgccggcggcgaaggagctgaagagtactgttttgttggtacgatggaagtgcagagactcatgtggtggtgctgtggtgcttttgtttcggtggtgtccgttgatgtgctagaaaaacgccgatgcgagcggcgccactggctggcgatccatgatccccggcgtgtcgaccatggtagagtttaccgcagctttctacagacagtggagaagttgaagatggcatggtgctgacagcagttattttgctgcggttgtgctgaatgacagactgccgtccagcagatgaaggcgttcatggccatcctggagtcgatggaggcatgttgatgatgatagagcagattgatttttgggtgtcgtcggtgctgactggagttggttgccttgttcttgctctgcagcccgagtaccgtgataacccgcgcctcatcaacggcaaggtcaagaggaagatctccgagaaggcgggccacgtacgtcataccgttattgctgtcgagtactggtgttccgtgtgcggggatctaatgttcttctctgctgtaaacgttgtgctgcagtcgccggaggagatcaacaacatgctgcgcaactacgagcagttgtctgccctccacatctggctcgtgaagcgcgtggagcgcggcctccgcatcccggagacgctggacgagacaactgagcttgtgcgtcaggacccgacgggtttccccgccaagaagttcaggtacgctcgccctgtgtactaactcaccttgctcctacgtgtctgacacattttccaactgataacaggatgaagcagcgtcgctactagttcgtgcacaacagtagaagctcgagcatagcagcagcaggcaggagaaacctcgcacagatcaacttgaggctgcaaaggacccctttctcatgctaatcaactgatcttttcccacccaaagcttcattaaatgggtacataatcctcaaatcaaatagtatcccatggggcataacctcatttgtcccaaaaatcggtcaacgttaaaccacattttgcaatccgaaggagaccagccaccccagcaccatgcagagctcgcacgacgtcgtgttcggggaccccctcaagcccgtgaagctggacgacttccgcaatgtcctcatccggtaatcaccaccaatgcttactgtctagacccgtagcgtagtcctcaccctgcgacctatttgctcttccagccaggaggagaccatcatcttcgcgctcatcgagcgcacccaattcccgcgcaacccggaggtctacgtgagcatgaaggagaggtgcgtcccccgtctattggtagtcgcaatcgctattgaggtcggagttgcttacacttggccaaccaacttttgtgtctcaatagcaagagcgcggcgttcggaggcctcaagggcaagtacacgacgttcgacggcagcctgctggactttatgctactggagaccgagaagctgcacgcgctcacgcgccgctacacgtcgccggacgagaacgccttcttcccgcacctgctgccggagcccatcctgccgatcatcgactacccgcgcgtcctgaacccgaaccggatcaacatcaacaaccagatcatgagcgtgtaccaggagaagatcctgccaggtttgaccacgctcgcgagtgacgacactgcggtacggagatttagtcacaagtatgggcgatacttgcggtttgcttatcttaatgtttttcttctgcttgcaacagtacggctcaacggcgacggcggatattgcggtgctgcaggcgctgagcaagcgtatccacttcggcaagttcatcgctgaagccaagttccaggcggagacggagcgctacacgaagctcattctcgcgaacgatgctgatggaatcatggatgcgctcaccaaccttgccgtcgagaaggttgttcattcccttgctggtttggaaggagatggatatcgtgcagcttggctaacggagctgcttcatgttcttgtccacttaccagaaagtgcttgagcgcgtgaagctgaaagcctcgacgtacggccaagacccgaacgctcccaccactgcttcggacgacaaggactggaaggtgaaccctcagcttatctcggacctgtaccgcgacttcgtgatgccgctgaccaaggaggtccaggtgcagtacttgctgcagcgtgttgcacacccgtctatcgctgttgcgggcgtggaagggtcgttctgctggatggcggcgcaggcgcacttcggaggcgagacgcttcagaaggaccagctgctgcaggccgaatccatcagcaaggtcttctacgatgtcaacgcgaaccgtacggcctatggtgtcgtccctatcgaggactcgcgcctgggtatgatcaaggagacgcaggctcagctgatgcgcagctcgctgaaagtgtctgccgagattgtgctgacccgttcgttcatcttcgcggccaaggacaagcagctcggcaagggctccgatgtgacgaaggtcttctgcccgaccgacacggacgctcggttactcgcgcaggcggagcagagctggccgagcgcgcaggtcatctcggttcccaatgtttcggaggctgcgagccgcgctttcagcgaggtctcgacggtggtagtgaccacgtcggtcgcggcggaggcccacaacctggagcaggttgacaccagcaacgctcttgcttcggaaggagctgtcacggaaagtaagtcgttcatccgcttcgtggttgtgtcgaagggtttccccgcggctacgggtaaggacaagtcgtgcctgagcatggagattaagcacgaagtgggctccctcctcagtgccctggacgtgtggaagaaccacggtatcaacctcacgtgcctcgagtcgatctaccgccaagagcagggcggctacgatttcttcgttgagatcgtcggccacttcgacgacgcgaacgtgcggcaggcggtcgagcagctgcagtcggtttgcaccgtcaagcaccttgggtcgttccctatcgcgaagcgccccatccagagctgaattactggaggttgacagggaacacgtattcaatccctagacgttatgcgttgaaatacagcacaatacccgggcatgatcagaacaatgtttcaaaaagccaagagcacaacgcgttgtttgcgattgttctgctctcgttgaatggccgaatgaggtgctcaccaccgggatcggctgttgtcatcgtccagatcgacgtactcagcgtcgattacggtcttccgtcggccgcccacagacgcgtcacgcaaaagatcgatcacgtctccagtttggcgattgcgatctacaacagtgaaacacgagcaatttagctacccaatccattcagcactaccatcaattgcaacgtacacttgagctccgtaaagttgaggttgcctccttggccgaccgaagccttcatggtcacccgcgcggaaccgtaagccccgttgaccgggaagacggcttcaatccggccagcaccattcacagctgtatgatcaggcagaccaacacatcgccaataagcaaccatgccagcaatcccacctcaatctcacaaaacgtactcgactcgatccactgctccggtccaccgacgctgacgttgtctcccattgtgtcacgcacgcgcttgttcgcctgcaagtgttcattggtgcgtcgacgcagctccccagcccgctccatagagctctgcatggccttccccacgaacgagaagatagtcttgacaaatcctctcacgacgaggggcatgccctgcacgagcgagtccaggtcgtcctgcgccgccgacttgctgcgtcgtcgactgcgcgtgaacatgtcgttgagcgcgtcgatattggagttcacgctgctgaacgggtcactcgacgaccggaagtgcgaccggtatggccccaaaaacctctggtacagcgagtacacgccgaagccagccgctcctgcaatgatcagcccgaacgccactgcaacaaaaacatcaactccgcagtattagccttgcagcagcaacgatattaactctaaattcacatgcgtacatgacgtggaggcgacgagcacccccgtgcccagcagcaccaggccgcccgtcttcaacgtggacttccagtcgttgccgctctgccacgggttgcgtccgggcaggtagaagcgcctcacttgcattgccaccactggggacgctctgccattggcgaacgcggcgctaacgggcagaaccagcggtcgagaccgtagcaaaggggacgaggcggttgcaagaggcgaagccgtcgagatagcgccgaatcgagggcggttcggcgcgctgcaagtgctcaggtgggaggaaaagagccccagcgagttgtacggagccgcggggccgcgtgcgtgagccacggcgcagcgtcggagcagccacgacgagctcatcaatcagtgtcggcgcaaatgcacaaataagcttccagaacctttttaatccgggaatgatggtaagcttggtgtgtggtacatagtctgcgtctgatctatttttagctcctccttgaagacagaccgtcgacactttttccgtgtcatttgatctcagtctcagtcttgatggagttctggccgctgggagtgcgtctagcaccgcccgccgactcgctcgcagcgcccgaagcggatgtgcagcgtctggtgtgggccgtggccggagtgttcgtcgccgcgtcggtcgtgtcgtccgcgctgctgattcgcggccacctcaaccacttcaccaagcccattgtgcagagcaaggtgagcctgcgtttgcttactttttcttacaatattcctgcaatttacttaaatatttaatcatttttttactgtagattgtggggattctgtggatggtgccgatctacgcgacggactcgtggttgtcgctgcgtttcaaggacgccgctctgtatctggacctgatgcgcgactcatacgagggctacgtgatctacctattcctggcgctgatgatcgcctacctgggcggtggcagcaacgagagggtgctcaccacgatgaggggactgccggacctggagcacccgtggcccttcaaccgctggttccagcccattcagatggggccgggcttcctccgagactgcaagatggctacgatgcagttcgtggtggtcaagcccatgatggccttcgtggccattgtgctcagggtcaacgggttgtacgaccagggcaacttcagcgccaagaagggctacctgtacacgagcctgatggtcaacgcatccatcacgtacgcgttctactatctggtgttgttctacttggcactcagcagacagttggcgccgtacaaccccgtgcccaagttcctgtgcatcaaggcggtgctattcctgtctttctggcagagtgtggtgctggccttcctgtcgcgcttccagatcatccacgagcttgggtcctggagcgtcgagaatgtcacgacgggcatccagaacttgctcatctgctttgagatgttcttcgtggctctagcgcaccaccgcgcgtttccctacaagccgtacgtgcacggcaacccggcactgcggaccagtatcttggccgaccacctcgctttcgaagacgccatgcgcgacttcaatgaggtcatgccggtggtgctcccaactgcgttcaagcctggtgctgccacgctcaaggccaagaagaagtacgacctcattcacccgagagacctcttcgccacggagactgtggggctgctaagtgatgacggggctacatccgatgcagagagtgagccatccttggactcgaggggatccaaaaggtccaagagctccaaccctggaggaaaggcggtgtcgcgcggttggaagttgtagggaacaagggtgcgagatcccttttatctatttgaaacattacacaacgatgatatacattcaaaaccgaatttgccgccacgcctataggttttgttttgttgtgccttcggtgcttggtattccggtgtcgaaagtgtccagggggtctcagttctctttacagatctggaagttgcgcaggtcatcctggccgaccagcttcagacccttctcgttggcgagatgcagcacacaaatgaagtagaacgacactgtcacattagagggaacctgtgcaaccatgtcacaacgttagtatcaaaataagtgctcgccgcgcagaaagatcaaacacctaccttgcccgcaacgttctcaaccacgttctcgaaggtcgtattcagcgcctcctcctcatcttcaccatccttttcaggctcgcgcgggcgtttgccactctcatttacggtaacatccgtctcagtttgttcagcatcgccactcttttcgtcactgttagctgtcgagccggttttctcctcgctcttgacaaccttcttctccaagtggtcccaaatgctgcccttcagcttcttcacgtcaacgcgcttggcgaagcgctcgtagtgcacacctatcttctcgaccacacgatcagcctgcaccaggccttcgacggagtacaagggttcagtgccagggtcgtctgccacgctagtgccatcatcttcgtcatcatagcttccttcaaagccggcactgtcttcattgtacgtgaagggctggtctcgatcgttatcgtcggcgatatcagcactattgtccccaaactcgaagtcattcactggagcaccttcccgttgggcgccatccgagacaccaccgccgcgctttctaaagaatcgaggtctttcctttagaaagtgccggaagaacaagccaatctcaatgtgcgtatccacaggcaataccagatcagaagcattttctgactgcttcttcaggttacccttcgagacctccagagtggaggcagactttggagcctttagtctcgacaagtcaggttcatcgccgaaaaagtcaacgagaatggcggccttcttttccgctccagctgtgcttcccttccgagcgcgctcaggaggacgctcgcttggttcggccttgattataacgccatcttcgtcgacctcgagtccatccttatccgcttcctctttctgcttcgcttgaatcttgcggacacccgggaacttccagtggccaggacctgcccagttgcgcagcattttaacgtcgaagtaggagtagtcattcttgccttctttgtcctcgccaccttgctcatcttccagcgtcgcggaccgaacaagagcggactcgatcatctgcgagaacaggttgttctcgtaattctccggtaagttctcgtttaccttcgcacggaagaagtccgcggcacttgatgtcagagaagactctttgtcgagacctttacttccggattcagctccctcttgagcaagatcttcttgcacgccctcttcgtcgtcacttccagccagatcaataatctctttctctttctccatgtctacgtcatcggcaggatcgacctcaacctctgcagtttcgtctgcttcagcaacggtgtcgccaccatcttcatcggcatcgtagtcggcgttgtcatcaccgaagtccagtgcgttgtcctctgctgcgttctccccgtccgattcatcttcactggcgcactccatgataccggccaaattcattgtgattgcatcctgcttgtccagcgtctgtcgtcgacccttaactggcgtagtgagcaagaaatcgttcttgataccaagcttgtggcgggactcgtctccgtagaattcatccaattggtcgtacattcgatacagcggagggcatacgctcaggctttgtacatcctgttcaatgcatgacagactgccaaacagggacagactgatacgctccttggctgcaggaggtttgtcagcattttcctcagcggcgtcagaactctcgccttccttgccctggtcctcttctgtggtggcatccttgggcgaatcttccttttctttctcatgttcattctcgggcgacccctctttctccttctcgttaccgtcggtggtagaatcttcggttgaaccctccttatccttgtcctgggcctcctccattgtaacatcttcttcagatccctcaggtttgtcctcaacagcatcaccatcttgttcctcgtcagcagtcttttcgctgccatcttctacattttccccggaatcaccttccttttctgtcgcagttttgtcctcttcgtccccttcagtttcagccttggccgactcggatttcttcgcctcatcactggcttctgaagacgcagattcgctagccttcgcaccgtccgacttctttgccgatttgagctcagattgttcctttatcgacgcatctgcatggatcggcttgcgcgtcaccaaactcacatccgacgagttcaacaggatcttgcatccgtcgtacacgctcaagttggccagcagcatacccttggcaccaccctcgtcaaacgactgcgacatcttgtggaacagcgggtcggcctcgcactccgtgtcgtagctcttgaggttgatattgttgaggttcttctcgatcgtgcgcgcgtgggtcttcctcgtcttgcgccccttgttcgcacctcgctcctcatcactggccgcgtcgtcgacgccgtgcttctgctccgtgcgcgacaggttctccaggatcttatacgacgagttccacgtgtcgtccactcggtacgagtaaatcttgatactcgcgtccaacgtgcagctcgccttctggaagttgtacgtgtcatcgtctgcgtctccgtccgcagcaattttcctgcattacatcacataacacaacacagccacatcaccgttaataacttccaatatatccaaccaccttaaataaaataaaaatgcgcttcatacttggacgagtccagaatgtcctccatgtggtcgatcaagtgcagactccacgagttcttgacattaattttctgcaaaccataacaattaagtacaaaacaataagatctatacccccgctctcctctgcactgtagcagcacgtacattctccgacgacatcttgataatggtcgagtacatgtcactaatgtactgtttgctgtgcgcaggggccgccgccgcgcctccagcggtgcctgccgcccccgccttccgctcgctgggcgtcagagagcgccgccgctgctggaaggccagtgagcgcctgcgtcggcgccgccgagcgatctcctcttcgtcattctgggacagcgagcgcttgcgcttgcccgtgacgcgcttggccgagtcgggagggggcgcgtctgcgtctgcgttggcctcctggtcttgggctttgtgctgggtctgctcctgctcctcctcgtcctccgtgagctcgtactgctccacgtcgctgccgtcgtcgctcttggactcgccgcctggcgccattttgtcgatgggaagtgatgtcaccagacagactgatttctaaatcaatagaaatgtaacttagaaatgtgaagccaactgcagctttcccaaatcacatattttaataatactgtaaaaactgtaattaggccccccccctctaatagtgccccacccctggagacttgcgatagtgccccaccccatgaaatttgacgtctttggctggagacttgagatagtgccccaccctcaaatagagccccaccccaaccttttatctgaaaaattgagtttgattctgagtttttcctcataaattccaaatatttcacatcaaaatttaaaggtttgtatgtcgacttaccaatgtcagtgattactgtcaaattttttctgtaaatagactttttaacgctagttgtttttggtgccccactccctttaatagtgcccccttgtaataataccggggcataattacagtttttacagtattgcttttttttgagagggtttactacagtttttactgggatagcagtggccgatgataggtcatgctgctaggcagcccaaatcgggttaattcgaacctcggtagctgaagccggtaaactgaggccggtatcgtggtcccttgtcactttctattggtgacccggtaacttgagccggtagctgagtccgatctcgggtcgctcattttctgtctacttcagatcgtgtttcgtcagtgcatgacttcagccatttcgcattctaactgcttacccacctatgtggtcacccgcctgccttacccgtcttacacacgagctacaacgattgctcagtacagccaccaaggtcccttagagcgtgttcgctaggtagctggagatggagatgacctctcatcaactctatttcttgtcttttgattggtcaaaatagtttagttcacaacgtgacaactggagaattaccccgtctccttctccagctcccagaggtggagaaggagaaagtagctggagattgaggcagttcagccgcacacacaatgaacgaagaggaagctgtactggttgctacatactcagctgtcgcacaggttgcagtcctcctatcaggagaatccgacgatgcgccgcgaggccctaaggaacagattcgtaccgtgacctcactgcactttgagcccatgctacagtcagccgcgtatgcaagttggtttgaagacaatcttcgctgcaccaagccaactttcctacggattgctggtttactacgagatcaaggtgttctgtttgctgctgccaaagtacggcagcatagctttgagaagaaagttgcagccgtgtcaaaacgagcccgcagcagggcatcagctgctgcagtcgtccacgcaaaggagggttgcttcgtagcgatagacgtttcaccagtattgcccttcttcttctgattcccaacgcggcgatgtgagtcctggtcgcgggctgtcgcagctacaactccaagcgcaacaggctggctgggtgtctctgaatgcggcagcgccagcgaggaagtgcgggcatccagctccgtttgagtagtggccggtgtcgcatacacagtctgggcaagagcaacatcagagacaggtatgtccaaactggcagcagccagcacgaggtcgccactggctgacgggaacggaggcgcagctctcggagcgtcatcggcagcttggtcttgccacgagtccggtgtctcgggcacagtgttcccggccgacgataaaacagcaaagtaaggagaaggagagcgagtcgttgcagttgcactgtgattggctaattttacctagatgcgctctgttgtagcgaacaagctggagatggagatgcacgaactccctgcagatatccatctccagctgcgtagcaaacacgctcttagagcgtggtcgggcgttttccggcataattcgccactatcaggttgaagcattgtcgatgcagagcgcgttatggacactgtgagctccatgaccagcagcttgaaaggtgaggccgagtttgcgccagaagggatagcgaagaagagcatgagcgtgtaagcttcgcacaacgccgatcgcgcgtcctcggcactatttgaatgaggaaccttcatcgtcacttgcattcgctagctttaccgcgcaaacactttgccagtactacatgtagtaattaatacattttctttgacgcaatgagaactgcatgtagcaacactgtttgaaagggggaaaatcgctggggagagcattgccaaattagcaatatattgctgctactgtattatctcggctgccgcgtacgttgcattgtgaaaacttgttagagaaagcttgttgcaaacttcgagcatcccactgttccagatagccaatgcataagacaacttcaacgtatatcgtcttcaacagggtttactaccgcttgctttcaaagatttacatgccgtgatacgtacgccgaaaattgttcaataaagactccgtgcagaacactgtaaccttagcgctacgcatgtacataccatgcatttaaacactttcaaggacctttacacatgtcaggcagggtgcttggattttcagtattggtcgtcgtggtgagacagtcgaaatggattctccccttcatatcattccgcgtgggttcattttgctcgatatcggatcccccgaaccgatgtctttgtcttccatgatgatgcacggctcattccacaagttcccctgaacagcacaagccgatcaaccaagcccctcaccacaagcatgggcaagtccaccaccaccaccaccgctaacgctctctccgagcaggagttcaccaagctgcaggcgcagctgcaccaaagtgcccaagatacgtggagctacctcgaagccctcaaggccaacctaggcgagtacgaccacaagcaccatctgcacctttcaagctcggcgacgtcgttcttcaacgatggcctcgaccacgccaaggaggcagtgaagcagctcagacacgtggctgaccacattcgcaaggaggctggcgaggccgatgtcgtcgccgctcgcaatgcgatggagcaggctttcaacgccctggctgacctgcagaaggtcgccaacgcgttcgacaccgagcacccgacgcccagcagcagtaagcagagcgagaagaagcccaccatgtccgagacggtagggtggctcgtgagcaccactcgtgacaccacgttcagtggtttcgcgccactgcagcgccagatcatcgaggtccagaccgctatcggtggggccgagaagccgtcgatcaaggcgcgcgcgaaggaggctgtgcaccacgtggccaacaagatcgacagcaagctggacaagatcaagggcgagctgaggtcaagtccgaaggccaaagacgagcagcaggccgaggcttctgcgcacagtgcgtaaagcgcgacaagctgatagcgacgtagcagctgcagcgagtaaatacagtagtacaaaatcaacgaacttgattccttctagctgaaggataactctgcgactacttcctatactttgctctcaaccagccacctttagggtaaagcgacagagtcttgttgtctacaatgccgatgttagatacaagtaatacagtgataggagaagaagtaccaaacgcgataggttgctcgagcagaaggccgactttgtgtatcgaatttgttcgagtacttgtgaagtggactatttttggctagggttcagcatgtgcatgcagccattaccagaggtgtactaagtagccatttcatcattgttgctgcagttgcagccaccatgaagcggctggaggcgatggagcacttccagcgcaagatcgacgcgaacccgatggacgcgagcgcgcaccaccacctggcggtgctggcaagagcaggaggcgaccaggatacgcacgcacgacactctcgcatcgcatggctcacgcggcaagggggccccgaagtctccaacgagctggcgctggctcggatccacgaaggcaaacgcgacgaggccgagacgctgctgcgccagactatcgcgcatgagcccacgtttccgcatgcatactgcaacttggcggccctgctggccagacggggcgagtacaccgaggcactgactcacagcaccaccgcgctgcggttgtcaccgcaagacccgagtctacaccggaacatcgcgcgcatgtacgagcaagtagggcgaccgacggatgctcttgcgcacttccagcgcgcgctcagtctcgcccccgacgacgctgaggtggccaagcgggtgtcgctgctgacgctcggccgcggacgcacggacgtcgccgcagaacactacgcccggtaccggagacgcacgggccagcactacgatctcaagctctgatatgtgcgggcccacgacgacgagaaagttgaggcgcgtccgctttacgcgttcatgcgtccagaatcaactcagttcgcagaccagagcttgcattatttttcgtgttcctagcattaactggattcctgccgaacacgaatggatgctttgcatccccgaggttcagcgaggagaggtcactaatgcattgcgcgaggtcattttcgttgggctcggctcgttggtcgactttggggcggcggcagacggacgactcacttgtcaactaaagccgtcgcctagctaaatctgtcggggccaactaaagctggggagctgaggcggagggtatcctgtcttcaaggtcagaattgccaccaagtaagtgcactagttgacagcgttagcggggtattttcggcggcaccttcggcgtggagggaggtggctaaatctctctccaccctggaggtcctcgagccctgccccttgtacttattcgagcctgccttgaaaagtggtgagggatgacacactgatagacatctatctatcttgccaatcttccccctgttttctgcgttctattgctggcagggtagactaggtctttgccttgcactcggattacgaaggtggcctccagggtcaggcctgctcagcttcagaagctggacgcagtcgaggaacagacctgacctggccctattcaattcaactcaagtccaaagtcgacaggcctccatctcgacgccctcactccactcctcgctctctctcgcgtcaccaacctctccatctggctggctggctcccggttcctcggcaggcgtaacacggcgacgaacaacaagctccgcattcgccatgaagcgctcgtacccgcacgtgtccatgcccgaagtcgacgacaatgcccccaccagcgtcgacacggaacctgttgccagcaccgccgttgccgcagccagccacgataccagctacttcagtcgaccacggaagcaccgggtgctgagccgcgcccctccttcggctctggtggtccacccaaacaccggactgacaaactgctgcaacgtcgcgatcgcgttgctgtcaccgctctctcctcgacggaagtgcggcgaattggaggcggtgttacaggaggagacgctgctgtgcctggtcttgtcgttcctcaacgtacgggagcaccagaccatccgacaaaccaatcgatcgtggagacggcgagtgcagacgttggctctggatcgacttgacttgtctgctcgcacctcgcccgtgtgcactcggacactggaccgcgcgtgtcaaggagtactacagagttacagtcgtgtctgtcggctcgatctgtcaggccagcgctctctcaacgaccgtgacctgctcgttctgacgtcgtgcttctgggcccacctcgaagaaatcgtcgccgacgactgcctcgagatctcggactttggcgtgctcgcggttctcaacgcgcagtcgcttcgtctccgctccgtgtcggtgcggcgatgcaagcgagtgactggggagctgttcgctgctcagtcctcgccgtcccagcagctcacaggatcgcacccatccctaaccgatctcaacctcgacgacaccagcgtgactcgggcgtttatttcgcgtgtcgaggcccactacccgacgctccagcgtctgagcgctctgcacaccccagcgcaccgcacgtttttccagcaagacccagtgttgagccctctactgcgggagctgcagatgctggtcagcaacgagctggtcgagctgccattgctgccagctctcctcgatgaattcagccggtggtgccgacgtcaacttcagcgtgacattggagtcttcgcccgcacactggttgccagtggaccacgaacgttgctggacgtcccgttgctacttaccagtggccgcgacgctgtcgacgtgaatgctcgagaggaggaggaagatcgcttggcgttgatgtccgcactgctgtacgcatgtgcgagtggcagaacgcgcgtgttgccggtgcttctggaactggcaaaggaccagcccagaggtgccgctttcgacttggagaacaccgatgccgatggacactcaccgctgagtctcgcggtcgccaatgggctgactgaagccacgcgattgctcctgcgagctggaggtgaagtgaacacgcgctcgttgagtctggcttcgcctctgtacctcgcaagcgagcatggctgggatgtgctggtggacatgctgctcgacgctaacgcacgaagggattacgctgtcgcgggtggcgcgactgcattgtgtgccgccgccaagaacgggcacagatccactgtgctaagactcctcgcagcggagaagcaggcggaggacgagaaacaagttcgaggccgcatcagcaagcagcaactggtgcaagcgctgttcttggcctgtgaaggcggccacctgttcgtggtctccgatcttctgctgttgacagagctggacgccaatgtcctcatggacgagaacgtatctcctctctacttagcgtgtcaaatgggatacgtggccatcgcgtctctgttattagcacgtggtgccgacccgagcttccgccgaccgcagggaggcgtgtcctgcttgtatatcgctgctcaggagggccacgacaagattgttcagctactcgtgcgtgcgggggccgacgtgcacgccaagatggacgacatgtcaacagcgctgcacatttcagctcgcatgggacggaaggccgtctctcgagcgctgctgcgttgcggtgctcgtctgaatgatcaaacccgatccgggttgacggcgctgtacatcgctagtgaggaaggtcacattagactggttaacttcctcctggagattggtgccgctcgcgatatccagactgccagtggcgccacagcactcttcgccgcagttcaccgaggccacagggccgtcgtgagggcgctgcttgatggcggggcgagcgccactgtcgctaaacacaacggcaccagccctctcgacgccgcagccctgctgggtgatgtcaaggttgcgcggcttcttctgcgctttggtgcacgcgttggaggtttggcgctgcactttgctgagcgtcgtcgggatgccgccgacctccagtctctattacgcacgcgatactacactcagcacttcctccacggcgcaagcactaccatcgtgacaagcgttccacctacagtggccccttctactgtaacctcgatagtagtggcggcaccagtttcggaaaacgagaccacatccgtccggtaaagttatcagcgtcctagcgttgtgtacgtaacgcagacgaactcgtagcattagagatcatgtaacttcaacttaaaaggatcaagtttgttgattttgtactactgtatttactcgctgcagctgctacgtcgctatcagcttgtcgcgctttacgctctgtgcgcagaagcctcggcctgctgctcgtctttggccttcggacttgacctcagctcgctcttgatcttgtccagcttgctgtcgatcttgttggccacgtggtgcacagcatccttcgcgcgcgccttgatcgacggcttctcggccccaccgatagcggtctggacctcgatgatctggcgctgcagtggcgcgaaaccactgaacgtggtgtcacgagtggtgctcacgagccaccctaccgtctcagacgtggtgggcttcttctcgctctgcttactgctgctgggcgtcgggtgctcggtgtcgaacgcgttggcgaccttctgcaggtcagccagggcgttgaaagcctgctccatcgcattgcgagcggcgacgacatcggcctcgccagcctccttgcgaatgtggtcagccacgtgtctgagctgcttcactgcctccttggcgtggtcgaggccatcgttgaagaacgacgtcgccgagcttgaaaggtgcagatggtgcttgtggtcgtactcgcctaggttggccttgagggcttcgaggtagctccacgtatcttgggcactttggtgcagctgcgcctgcagcttggtgaactcctgctcggagagagcgttagcggtggtggtggtggtggacttgcccatgcttgtggtgaggggcttggttgatcggcttgtgctgttcaggggaacttgtggaatgagccgtgcatcatcatggaagacaaagacatcggttcgggggatccgatatcgagcaaaatgaacccaggcggaatgatatgaaggggagaatccatttcgactgtctcaccacgacgaccaatactgaaaatccaagcaccctgcctgacatgtgtaaaggtccttgaaagtgtttaaatgcatggtatgtacatgcgtagcgctaaggttacagtgttctgcacggagtctttattgaacaattttcggcgtacgtatcacggcatgtaaatctttgaaagcaagcggtagtaaaccctgttgaagacgatatacgttgaagttgtcttatgcattggctatctggaacagtgggatgctcgaagtttgcaacaagctttctctaacaagttttcacaatgcaacgtacgcggcagccgagataatacagtagcagcaatatattgctaatttggcaatgctctccccagcgattttccccctttcaaacagtgttgctacatgcagttctcattgcgtcaaagaaaatgtattaattactacatgtagtactggcaaagtgtttgcgcggtaaagctagcgaatgcaagtgacgatgaaggttcctcattcaaatagtgccgaggacgcgcgatcggcgttgtgcgaagcttacacgctcatgctcttcttcgctatcccttctggcgcaaactcggcctcacctttcaagctgctggtcatggagctcacagtgtccataacgcgctctgcgaacgagggagacaacgactcttctgcaactaagacttggtgcttgagagcagagaaccctttgaagttgtcgtgtaaggtgcgcttcaccactgcctccaccgtatcgctcgctcgggaaaagtccgcgccactgtcactgctgcgtccgctgttgctggccctactgtcttctccgaaccagcttccttcagacaccgatcgggcgttattcgatcccaagttgctgttcttggggttgtcgttgctgatggcgttgttcccgttcttgtcaccgctgtcattgttgccggtgagtgcgttgccaagaatccctgcaattcccttcgacttgtccttccggtcgtaggctcgagcggtcttcttgagctgacccaaggcgtcgaagacggcgttgatcttgctgcgggtagcagtgatctcccactcggacggagcgtcactcttggagatctggtcagcgacgtgccgcaactcggaagccacgtccttcgcagcacgaatgtcgctcctcatgaaggactttgaggtgttggcgaagagcagcccattgcggctgtcgtactcggcgaggttggtcttcagaaccttgaggcagctggctatctcgtctgctgtctgttccagcagatgctccagcttggagaactcttgttcagcggcaacgttgcgagtagaagacttgcccatgttgtgcttgggtgaactgaagggatgcaggcgctctcgtgtctaccgtcgaaatccgaaatgagagctgaagtcaccgcgttttccagcagcaccaaggcaacccactaacctggaaggttgttccacagaatagtggctgaactcgggacaaactgcaaacgcatcgcacgaattgtgtcgcaagatgaggctcgttcactaacgactcgcgtctttaatctaacgacacaaagcaccttggcaacttgcctctcgcatgctcgagcatcgatgaacgtgtcattccacctccgatttgggtggtccacgcattgtttttgacaaccatcagtcagccaatcaacgagctggatgcagttccccacttttcatcgagacgtaaagcagccaagatggcgacgtggttccagaaggagatcgtgctcacggcgcccagccgcggcttccaccgtgcgtcttccgtatcacccactaaaggaaaaatgtccccaactcttcaggactaaacttataatttttgttttccttcgatagtggtgacgcgcgaggtcgagaagcaggtatgtcatggtgtccccataccattactcgggcacttgggcgtataatttgttcatctccttcgtatttattttattaatatttgtttgcaattggtggcgtagctcccggagctttatcgcgtcaaggtcggcatggccaacctgttcatcaagcacacgtctgcgtcgctcagtatcaacgagaactgcgacccggacgtccggtacgtagaacgccattgctatctctacgtagcgggtggcgattgcgctgagcactcattgatatttttatatttttgttgcaggaccgacatggagggcgcgttcaaccgcatcgttccggaatcgtggaacaagtaagcaaggcgcgatagagcgcagcagtgtcagggattagtatttcctcttcttacacttgtttgcgttctttgtagggagtttttccgccacacggacgaaggcgacggtgagtagaacatgctggggatcacctactttatcgcgagtttctaatgcttgactcatgatggagtagatgacatgccgggccacatcaagtcgacactgatcggcgcgtcagtgaacattccgatcacgaacggcaagttcaacctcggcacgtggcaaggtagggacgattgcgtactgtctgggtagtatggcttctcattcgttgtccatggtaggaatctacttgtgcgagcaccgcaatgtcggaggctggggctctggacaccagcgtaaggttgtcgtcaccatccagggctcgacggcttaagcgcatttccgcggacttttgtggcatcctcgagatgttttgttgtcaagacacgacgaatgtacgtttagtgagaacgctaaattgtaaacatggccgcaccggcccctgcttgctcttttccgagacgagtgcattaagtatcgtaccgagaagcttctgccagcaccatgcgcacgcagcccagtattgggcgggttatcctgaggttgtacatgatctgtgttgctcgccctccgaatagtgcattcgaaatgtgtctcgtttaaaccagagatgcagctcgaactcgattcagcgagtgctgtcaaatcctgacgcagcctaggcatcccaagctgagcacgccgcggtcaccacccagcgattcttgaacaccacgaaattattggcaatgacatcgatatgggtgtcatggttgttggtgacatgttcgaagaagaacgaggcaagccacgacgaagctcgacaacgcgctaaagtaaacacaagctgaagacaatgatgagatgaagatgataataaagtatgccccagtggactttgagcaaaagacaatgctacagtagtatcagccacgtttcgggcttctaaaagtctgacgccccttatctgggtaagaatttccagcccttttcaacatccgtctcgacattttcaaccttccattccaccttggttgcacacacttttgttttgctgtagacaagaaatacattatttagcatagatttacacgttggtgtcgttgccaggtgaggtagactgctgtttgaaggctcaagcccaggtagcaactgcgcattgtctatccacactggacgactccagcaactcgatctctttggcggcgcctctgcagctttcttcgatcgaataaatgcgattccatggcgggcgcgcatcgggtatgagctgcaaattgtaacaggcgcaggcactgaacaccgggaggtatttcttggagcggtcgatgggaatccgcataccctgcggctccccgtttcgcacaaacagcaagaatccagccaggaggtcgaccatcacaccaactcgatcctcctccttaaacgttcccgcatccaaaaagttcactcgagcggggagttgcggcttgggacctcggaacgacccggtagtgatgaatccaccctcgcagtacatcaccgccggcatgtggtcgcatgccggtgtcggcagcgacagcgtccgcttcaaatgttgcgcatcgactccatagtaccggaatccagcttgtccctgggagatcacctcagtgatgccaatgtagctgccttcactgagtcccacacactcccagtagctcaccgcccccgcagcacacgcccggtcgccaaacatcgagcctccgttaggcccccaatgggacacatagcggtctccattctccaccaagtacacgtctccgccgtgtctcgcagcatcgaagtggagatcaaagttgtctgcaagtacagcagtaagtgaacgaacgtatcggtcaaacgcgaagaaatgggtaacaactgaaagttatccccaaacttacacgatccaactgcctgtagttgccttagcagcggcagcacagttgcaaattgcagcgtctcgctgtgtggcggttgacgcggcagctccacgcccggcagcaggcaactggcgcgactgacaagccagaaccaaacggcagcgcagccctcgcggccgacggacttttgtgcgcacacgatcgccgccacgccgcgggcgtccaggaactcgagtagcggcgccagtgccgccagcgtcacgctggagggggcgctgctcgacgctcgcaattgcttggacggcggcatctcgtcgctagctgcttatggttgacctgctgactggattccagggatttcaagccatctgattggtggatgacaacggttatttttcattagctgagacttgcgctatgctggatgcagtgcagctcgtggcgttcgcgccgctgagcctactgctcggcgtgccgttgggggttctgaaggagaagctgcggaaacattcgttgaagcgctggctgctggcgctcgcgccgtttgccctcgccccgttggtacgaaaatgcggataatgtgaatatgtcctaaacctgtatatgtcaggataaggaaatacaccgactggttgatgcatgtgaataatgcttttgtagttctcgactcgtgacggtgctgtgttggcgggtggctacttggtggggagagctttgggagcgtcgttggtcggcgttgggctcacgggcggcatcgcgactggcaagagcacggtctccaaagcctttcgggaggctggagctgctatcgtagacgccgatgtggtggccagagaggtggtgatgcccggtcgcggcgcgtacaaggagatcgtgcgctactttggcgctggggtgcttaatgaagaggatgcgaccatcaaccgcgcgaagctcggagctatcatcttcagcgacccggagaaacggaagaaactcaacgcggcgacccacaagtacatcatctgggagatgttcaagcagctcgtgtaccagcgtctgatctgccgtaagcgccttgtgatgttcgatgcgccgctgctgttcgagaccaagctgctcgagtacttctgctacccgacgatcgtggtggcgtgctcggaggcgaacgagctcgagcggctcatgaagcgggacaacatgaagagagaagatgcggagaagcgcatcaagtcgcagatgaaactgcatgtacgtgacgtattgttggcatcaaccacggtaaaggtgcctggtcttttaattaacttctgtcgtgatgttcccatttgagcaggagaaggtggccaaggcagacctcgtgatcgagaatgacagcacgctggacgacctactgcttcgcacgcggcgaacacttcaacgcacggctgcgttggttggcgggttgcgcgaggtgaagctagactaacgcaggtataacagcgtaatagacttgctgtcaatatactgattgcctcccttaaccccagtgagtgtttttgtgtttttgtgcttacacaaaagccattttgattcgaacaacgttagccaacgcaatgggccgcaagggcgtctctctgcaggagaagcgcgagcgcatcctgcacatctaccacgagtcgaaggaggtgttcaatctcaaggaagtggaaaagctcggctccaaagctggcgtcggtgcgtgggctcagcgctctcagcaagagcgatagtcaaacaattattatggtctaacgtaaaatacaattttactgtatattttgtatatgcagttctgcaaacggtcaaggacgtgaaccaagcgctggtggacgatgcattggtggactgcgataaggtgctgcgctattgtagctacgtatttagtgttgcaggctccaactaatgaagttttgttgtttttaattcgtcttctggctgtgcagatcgggtcggggaactacttttggtccttcccgtccaagctgtcacagtcgaggaagcgcaagctcagtgagctggagcagcgtcgccaaaacgtacaggaaaagcttgtcaaagtgaaccaaagtattgaggaacagaaggctctgcgctcgggatcggtacggtgaagtgccagcagcaatggcaccggaagcttaagcgtgagtgactaagtgatggacgttgtcaatggtgcaggaggaacgagtgcaaaagttgcgccggctggaagaacaaaaggcgaaggtgcaagcactgcgtaccaaagtgcagcacttggcggagaacgaccccgcgattttggaagagctcgagcgcaaggtgcgaatggcgaaggaaggctccgacagatggacaggtatcgtgttgcttgtgtattgtgtgctacctatagtgctcgtagggtttgacggtgggtgaactgcatgcaacagacaatgtgtacactctcaagtcgtgggtggtgaagaagcgtggtgtcgagggccgagaggtagctgcaacttgtagaagtgctcatttgctggggaacgtttactgaactgatcatgtccggtactaccatgaaggttgacaaatggctcggcatcaaggatgattttgactatgtcgagtgacaagcactggatgctctgcgctcaggagaaagaagttggtcgtacgaagggagggaagaaggatactttcgactggcgattaaactaaactgagctgctacttttgacaccctgataatgacccaaactgtagttgtatgtagtttaccagttgaagacctccttgtggaagtcgaagttgcagttgcgcgcgagtgactgggccgtcacagtcatggtgggcggaccgcaggccacaaccgtcaccttgcggccgttaaagcgactggtgttgatcagctcgtcaagaattggctggccgccgcggtaggacagcgtctcgccgttcgagcgtgtgaccacaccgtcggtgcgggcgttcgacacgtggaacatccagttgatattgatcggcgccggagcgttgttgccgaggatggccatgttcgggtcctgaacgctggcgcgggctgcgtagtcgagctgggcgtgcgtcggcaggaactgctccatcatcaagatgtcttccggctcgcgcaccgaccacagcacgtaccagtccgcagccttgggggccttgtccgagtcgctgctgctggtcgggaacaggcggtactggttgataaggctcatcatgggggtgatacccacaccaccggccaccagcacaactgcatcgtagcgatccacgttgagcgacatcttaccgaaggggccacacaggttggccgtcatctcatactgcgtgccggccttctccaagagctgacgcgtgaaggagccgttgcccatagccttgatgcagaagccaagcgacttgccatccggagtcacgatggaggagaacgggtgccactgagtagcggagatggccggcagacgcacgaggaagtacgagccagggttgacgttcatggccatcttgcccgtcttcggggtcgagtcaagaaccagcgtcgtggagttggagcccgagtgcaccgacaccgaggccttgtacgagcccgtgaacgcgctcgaccagcggtacagcagaccaaggacgtacaggccaagcgggacacacagcgctagaccaatgaacttgggggcgtgcaggatggtgaagacgaagcccacgatcgacagcacgcggtgcgtgaagtagaagacctcgaagaacatgcggcggatgtactcgatcgacaggaacagcatggcgatgaagcacacgaaggcgataaaaccaggcagcggcgtcacctcaccgtacttctcattgagcgtgaggtcgacgaccttgctggcctgcacgacgtggacaatgaccgcgacgttcatgataagaccgagccaacggtggaacttgacgatgcgctcgaacgagctgccgaagagcacggaccacacgggcagccgcgccacgggcaggatcaggaacatgaggatcagcaggctcacctggcccgacacgacgtagtcgtcctcgtcgctcagcagggcaatgagcaccaccacggcgcccacgaagatgagcatcaccagcagctcaccgaggtggaggtcggccagcgtctgcatgaacatggtgtgcggcttggccacgggcgcgttggtcgtgagcttgacggggggcgcggccaccgtgcggtgcagcagcagcttgccgacgggcgaggacttgagcgccgcagtgagcagcaggccgcacacggccatgatggcgaaggcgatgccgccgacgatgccggggcagttcttgtcgtcgcaccatggggtggacgtgctggagccgaccgtcgtgctggcgccggcgcccgagccggaggcggccgcagccgcggcgatgttgaaggtggcggcgccgttggtgccgctcttgtgcgtcgagatgggccacgacgtgccgtatgcccagatgaagtccgtggcgcccgtggctgagatggccacctcggacgtcgtggcggccgccagcgtgcgctggtagctgaagctcatgctggaggcgctggccttgtccacgacgaacgaggtttggtcgctctcctccgtcacgtcgctgctgacgtagccgccgagcaggtacgacaccggcttggccgtgtccttgaagaacatcatgacgttggaggccgggctgctcaccatgttggagtcgcgggacggaccgacgccgaaccacgtggccgagctggccacggacgcgtcgagctggtactcgatgcacacctcgtcgccctgcaccagcgcccgcatgaagatggggctgtcgcccaggcgcgtgcccgagagcgcctggaacgcggcgctcgagcagatgtcggaggaggtcacggcggcgctggccatgtcggggctcgcggccagcagcgcggacgccaccagcggcaggaacgagcgggtcaccatagttcttcggactcttgagggtgcagccaattcgacaataaccagagggaaccggggagcgagcgcgatggatggatggacggacggacacggatcgagggcgtgtgcgtgtgcgctccgggctgcggatttcaaagtgagacggagagcgggcgacttggcgccggcgagcgtcgccagccgcttttcgttctacaccgcagtattcgttctgacaatgtattgaatcattaaaggtgcaaagccacatcgactcttactgttccgcagaatggtacacatcggttgtcgaggtgcatagagtagtttgggtatagcctctagcgcggcaccgccgggattataccgtcttattacattggagtccgcacggatcacttcactatgggctgaagcggggctttcgagttcagcggagcgctgcgtggctagttcccaaggccgctgccaatccactcgatggctggcgcctgaggtgagcccccgtaggacactttgctgttcgactgaacccagttagccaacggctggcgcgcagtcgcgttcaaatccttcagcccatgtcaaaccgagcaaaatcgctacatgtagggcaaccagctttttcgcagcgacatagagcggtgatcgtcgctggatgttctcgtcgagttgcagcggcgtttaccgtacgaaagcgccgctgcaactcgacgagaaacccaccgttgcagtccgatgaaactgcaacggtgggtggcgtgtttgacagtcgaagtggacacgagcgctatggtatcggacctctagccggattcggtgagcctcggtggcgtgaaattactaaccgccacccggtcgccatgttggtgagctttgctgttcgaacgcccgaggtcacggcacggcactgctgtgctttcagcgcctctgaagtaagcttagcgaccagcgtgagaagaaggaacactcagcgttgcaagatgaagcacgatgtgtcccctgtcatgttgctgtagaaaggagggcgttggacaccaccgcgttgcggtggtacccagtttgacggatcacattgaagcagccccccatcgcacagcgaccaaccaagatcacaaaagttcatgacccgcgctcgtcgcgtcgccgagtgaacactgcggtggccacacgatcccaaatcggcgcggacatgtgtcgcctatcggcgctgtcgcagtgagctcggattcgtaagcgcacagctcgattacgtaggcactgattaaagcaacattgaaatgttggcgttgcgtaatattgagcgcaacaatggtgcctctgcctaacattgcacaatgttacggtatctatcgtagcagaatatttggtttaccaatgtgacaatagtggacgcgcgtcgtcacgacagctcgcagctcgacagctcgacagcacgacagcgaagcacgctgtatcactcggggcgtgcgccaacagcttccgccgctaacgcggcaagcgcgtcatggtgtacgcaccgacacatgcagcaggggaatgggctctacgggatctacgcgcagctctacctgggcgccacgtgttgtctattcctagttggcaggacactctcgcgttggctttcgcctgcggactaagcgacggcacttcggggggcccgcccctctctcgcttcgctcggggggcgccgctgtgcggcctgccccaccccctcgtgccttacgctaagctctcggctcggccaggcgcggtgtctaggaaaaaaatatcgggttgcagcgctcgccttcgctcgctcgcgcagacccgcccccgcctgatcggcgggtgttgacgatcggtgaacgcgctcagcgaggctcgcgctcgcgttcgctcgccctccccccttaacctaactgcgctgttggctagaggcgcattaaaagcgcttacgactgcttggaagttagcgcattcgatcgcatgcaacacgcatcgcgcctaacgcaacgcaacgcactgggaaggcgtttgctcccgcatacgtagtacacacacgcatataagcaccgcagtaggacatgcacacattagaataaggttgagcgggtgaccgctgcagacggtcgcacgacgcggaggctgagcgagctcgcgggcgcttgcttccttcccggtagattctgaaatgagagctgttgtgagccagtcgctccaaacatgaaatttcacgtcgggaaaatttacattgcgtcaatgttagcgatcacgcaacattggacccatcaatgttattgatcccacacattgaggctgattttcaatgttgctttaatgactctcgattacgtatcggcaggttgatgccagtctcggcgccgattgtcgacaccggctgcttcagtcttagtttttcagttttatctcatccctaaaactgccgacccagttctccaagccaagtggacgccgcacgggccgctgcagcccggtgttgctgtacaagctgtgcttgcgcgacggccaaggctttaccgagggaggcatgcgtcgtcgcatcatccgattccagacggagggcaactcgttgcagatgtacatgtacagtgtattttcctcatctgtcgaccgactcccaagtccacggtgttcttgccgcgtaagcgaagcgctacatcatcatgctcgaacggctggctggtggtcagcatgttcgctggcaagcactggcacttttaacttcgagtctcgcccggagcgattccgatacaaaagccacgtaagtctatttccgacccccgactacctccatcactacatcccctggaaccccctaagtcacccccctaatggaactcccgattaacctctgcaaccgcatcccctcaaaccaccgcctcaccacgacctcaggaagggaaaccgatcaactacgaatagtttacgaatagtttaggtcaactcacttagctcacttggaccagcttccagcaggctccgaaacaagtgccaaaatatacaccaccaggtcaagttctctcaactcacttggaccagcttccagcaggctccgaaataagtgcctaaatatacaccaccaggtcaagttctctctaaaaacaaagtcttcatactctcgatgataaacggttcaagaagatcgccgctaacgtggcgtgtacgtatccaaattaatcaactgcagggcaatatgatccagaaatggtgatactgtatcctatgcatatatacacttgctgaggcgaggcaagatgagggcttattgtgcacttggcgtccactgtccattgcgacactcgttacactccacgacaaaaagatatggacaccaccaaaagtggctgtaacttcgtcattttttatcgttttaaggtgcggtttggactagagttgctgataaagatctgcacgctactaacacgcgcgcttttgcgcttcttcaggtagctcacatacaaatcactggttctgcccaggtgacaaaacttatggacagctaatccccatgcaaaatcctatattaaccaaaaccccttacaactgatacaacttggactttgtatggggcaacaaaggaacccatgatttctccactctaccttagtactgagccatatatcatcgaccaacagtttagaatggagaagacaatcgtatatccaaaagatagcagcatacagagctacaaattggcactaactaggatgcaactgaaggtgtctcgcaaatcatcagataatacatggtagccaccactcgaaatttcagtcgcttactacttgctcagttctgtgcgatggtcgatgtgtttattacagatcactaaacacaccttctagtacacgataatgccatcagatatttgtctaacgtcgcgagtatcgccgtgaggctggttcctttgtcgccccatacaaagtccaagttgtatcagttgtccggggttttgtttaatataggattttgtatggggattagctgtccataagttttgtcacctgggcagaaccagtgatttgtatgtgagctacagtcaaacctgttcatatgaggccctgttggtgaccatctactacaatgactcatataaaatggactcagttaaaaaaattatgtggtgcacgtaaagaaatcgtgcatagttcgctgccgctttgccttcaccgtagtctctcgaaccaaagcagtcaaggtctgtaaagctcttcgttctctgtcagtctgctctccgcattgcagcagaaatgcagccagctccatgcagtgtctcagagcaatggcaggttgaactgcgagttcctgttcctcctcttcctcctaagcgctccgccagctcatgcgccttcagcaggagcacgtcgcccgccatcgccgttttagcttcgttctgaaagaaaaattccctcagttcccgctcgaactgagggaatttcactcggcgccgcttggtcgcactcagatcgacgtggctgaagtaggaagaaggcaggttgcgcagtcgggcgagtgtggcacggctgacccgggccttgaaagttgcgtagatccactcggcgagcatggggttgttcatgccaggattctgcttgagctttaggtgcacttggagcttttgttctagcgtcagacaggtgcgaggagacatggcgagcgaagaaggcttgcggtaggcgttgagtgtcgagcagtggtgctttgaagagtgtgtggccgtgagcagtgtgaatcaaataaacaggtgagacctaatttggtccccaaaaatgtgactcatataccttgtatgcatataaacagagatcatacaaaaactaagtgaaatatttggtagcgacaaagcctgcatcaaataaacggcatggctcaaatagagaggatcatataaacaggtttgactgtacctgaagaagcgcaaaagcgcgcgtgttagcagcgtgtagatctttatcagcaactctagtccaaaccgcaccttaaaacgataaaaaatgacgaagttacagccacttttggtggtgtccatatctttttgtcgtggagtgtaaagcaacttgggtttgggcaacttcgtgcaacttcgagtttaccctattgtgaaattcacctggatcttcacgtgacggcctcattcgccaattcgcgccgtcggccacagatctgcgcgggaaacgttgcgcaacttcctgcagcgcgctccacacgatcatgtacgcctagccgctgctgcagccgcactgacatgtagctctgatctaacccttcttgcgatgctatggcagggataacgcttcaacacagccgtaacgcgggggttggtgaatgcgcgcttgcaaattcactcgctttctcggcacgtttggataacagagacttgactgcgtgtagcgcaatgacaatggtcctgtagcgagttgttcgtcgatgagcacgtggcacacattccaacgcgttgtgataagacctaaaatgcagcggcgcgaaggcaaagacgcattaaggggactattatcggtggcgcttgatctgatgtggctcatgtgcatggcatattgcacggcaccacgtcgccttttgagcacaagtgacccgcagtggtaagtaatctgatggacagtgtgcgttcgttcctctattgccagactttcgggcatgtacgtcataaatgtttgccgtctaactgctgtttttatatgccatgttactagagtatggtttgtggctgttaaaaaacgtccatgcgccaacatattgcgtagctcagaggcgagaggacacgagactcgagcgttgagcggtgcgcaaggtctactgggcaaggagcttagtggctcactacgaactcgacccagttggagcgctgtatgttgatgaagctgcgattgggcacgttcagctcctgactcacggtctccatcaggatcgacgccgtttacagcagcagcagtagcaacagcaacggcaaagacgttcattagccaagtatcgctggtttttgatccctctaccttcacctaacaacgaagcaccggaaaatttgggcagagatacgataacacgagatatcaaaagaaatatgtatgagaactatcgcgttaaggctcttctgtaagtttgaagtagctgaagattataccgtcctttaaaactatgtagagaggtgtgaacgttagcgtacgaaatgactgagccaagcaaccacgacaaaatgcatcagcatgacacggggaccgatgatcccaacgcgaactatgtaaggtaggacatttttttactgcatgtatttactactagccttgttatgttttgaatggtatcaaaatgccactgcggccatacagtcgtcgttgcttagtcacggcaacaagggcaacctgcaggtatggtatactgttcttggacgtttattctaggtccactactagaagagcggaaactgtgaagcatggaatttcaggactagcatgcaacgcagagatacgtggacatcgagaatacttcatcagtgctccacaagtacttgtcacgtagaagatagcgaactatctacttcaagtacttaagttttaattatgtatcccgaagattgagcttggagatacttctatcattaatggatacctgtctaactcctccaatgtgtaagctatataaattgtacaacaacaaactgtttgtgagcactagcgtttgcttaagttcgcgctccactctgccccacactaagaaagtaattatcacgactccaccaaaaagttgcgcaactttctcagtgatgatgtggatcatgctgcgttcatcaaacacaacacctagtgtcctcgcctagaggagcccccattatgtttaaacatagtatagtgaagatagtcactaaggtctcaaacagcttgatgtagattggagttcctagcttgcttcccagccacatcgtcagtgatggtcccgctggaagtagcgcgtaccacacgaaaaaggcagtgcgaatcatttgtttatctgtgtagctttatgatagtgacagaacacgagtaactttacggcggctccagaaagtcaccgcccacatagtatacaactaatatatttggcaactgctcacgaactagatcatattttcctgccggagaaacacgagcggaaccgcaaaaggataaactacaagtgaaggtcaatgaataggaaaaacgtaacattgctgtatttttatcaggaaaaatctggcagaaattacaaaacacggtgacaaaaaatcaccgcccacctcgttcccatacaaaaatcaagtcacaaatcagtacttcgtgtgagcccccttgctggcggcgacagcgtccaggcgagccggcatggaaagcacgcacttgcgaatgacatcgtcgtcgatactcgtctatatctcaaggagctttaccttgaggtcctcaatagagggttctggctggcgattcagctcccgcttcatgatcgcccacacgttctcaattgggttgagatcggggctctgggcggggtgacgaaggtcatggagccctaaggacttcacgaacttcgtcgtggccttagcgcgatgcgctggagcgttgtcctggacgaagttggtaggctggggtagaccgaggagctggcgggtgatcgggatctcctgttgaagcaggtgtcggtaggaggcgccgtccacggacttctcgcagaagtgcatcgtgccgacgccgtctgccgagatggaggaccacaccatcaacgacttgcggctggacttgaaggtcggcacgacgcacttctcatggaaggcttcaagtgtccggcgccacaccgagacacgaccgctggtaccgtgcagctccaccgatgcctcgtctgtaaagaggacattcgcccagtcgtccttctccagatgagccagcctctttgcataggcgaggcgctgcttgcggtgcatcttggagaggtaaggttcttcctagcagagcggccgttgaggccggcggttgcgcaccacctgcggcgacaccacgcggccagtgtgcagcagccaggaccgccgcgcttgagaaccggttagtctcagtgtctcggagaatgcggcggtcatcgcgggcagtagtgagccgggggcggccttggcgcggagctacgacacggtggtcattcaacttgaagtgtgcgataatatcgcgcactgtcgagcgggccatctccagctccctcgcgattctagagtagctgtagcccttcttccacttataacgcagagacaacggatctcgtgcgagtgctggcgacttccttggtccatagttgagcttgaattgttcgaagtgaggtgaataggagaatgagagcaactagcgcggcaacgattgctgcgttgccgccaagatgcatgggttcgatcgagcaacattcgtgcaacattgtgaccctccatacaaaattttatataattggcaagaggccagccactgggcgctcactatatttgcaccttgttttgaataaacggtgattggcggaacacttcccgcgaaccgatgttattggctaatgttttcgtcttgggttcgctggcggttctactcgtacccgatccgattagtggttgtctagctattgcccaaaatcgatgttgaagttgcctgggcggtgactttctggagccgctgtacagtgtgaataccatcgatgcaaagccttacctctgacttggtattcaagtcagtaataagtggtcgaccttcgcttgaaagggttacctgggctgaactgagctgtgttggctcaggtcaaagtaaaagatgttcactccgccccctatataatttagtgtcctttattcaacagcttgcctagcagtacaggcagcgtgaacgcactctgctgaatggtgcatgtagttgctgttgaagttgcagagcctactcgctagtgcaaaaattcagtattgcaaaggtgctgaaggtgcttgtagttgcacgaagttgctcaaacgaaggtgctcaaaggtgcgcaaaggtgcacgaagttgcgcacctttgggcaacttttttcgaccagtgcccgaagttgcacgaagttgctgaaggtgcccaaacccaagttgctttaacgagagccgtccattgcactcggtcatgcatacttactgtaacacgctacgcaagtaaagtttatggcactaggcatgattctcagctttgagatttggtccattgacccccgtccgaccgtaatagatgacggagtcaataggctaaccagatcgtgactcgacagcatccgcctcagctaaaaatccaccgtgtccactacatagtgtgtcaatattgctgagctgacgacagcctcgctcagttccgcggggacttgcgcgtctcgtagatcgccaaggtagccatggttgcgataacgcacagggttacagcagccacggggatcgtgagataggataccgccagcgacaagaagcttgggtctccagcgggcttcgcctgggtttccttttttgtggagcggtgagccttgtcttgcgtggctaggtccgctgactgagtggacgctcgtcgccggcggattgacggggctttgttgccgcgcagacgcttgctggcgcttcggcgcaccatggagcgagacggtggtgggggcgagcgtgattcgctactggccgtgtcttgccgaaggttctcctgtcgctgacgatcaattctgccgttgatagatgatgcgctgcgctgcttggtccgcaacttcagttttcgtgacgatgatctggtgctggagcttgcctggcttatcgcgctgtgtgttggagagtccgggttggtcgagagagatcgctgagagtggcgacgcccactggggatccgctcaatcggcctgggctctaggctcagcaagtggatgccctcgctgctggttgggatcatgggaactgggaccaacggacccgctcctcccgacacggggggagatgccatgcttcgagaccgttgcgccttccggtcttgggggtgacggtaactgttgtaccgtgtcggtgacggaatcgaccagccagcttcctcgtcctcgccgtcttcgtggtatccgttctgttgatgtccatcttcgggtacgctcggcacggatgaagatgggcgtgggcgcagtggttccgctggagtttccatgccccaagcatcgtcgccgtcgtgtagcacctggttttcatcgctgatactgctactgatatcgccatcactggagaatctgtcgtcttcctcctcctccgacggaatcgcaggctccgaagtaggcggccaggcactagctcgaacgtcttcgatcagccttgaactaatttgcagctcctgcttcgttaaaatgaactgtacaaaacaaacaagtattggcagcatcgaattagctcaccaatcatctcgtctcgcccaaagcatggatattaccagacctcaatatcgctgaagaggatgtcacggtagagcaccatgatctgcaaaagatctattgcgacagtatcctgcctttcactcttgcgagcagtctgcacaacatgaagcgcccgcaccaagaagctgtaagcatcaactatgatcctgagaggatagacaccgctcttcgacttaccatgctttcgaactcggaagactcgctgaacacgtggtggtgcttgtcggcgatcgttttgcgcagcggttgcgcttccccgctgacgagtgcaatgaggtcccagagcgctagcaagcgcagcaggcagtgtcgcacttcgcgttcaagacggtccaagaccccgcggatggcaagcagcgtcgtgagtgctggcgggacggccagactctcacgcagcaggaccttccggtgcctggtgtacagctccaagggcactaacgggcccatgaggttgcggaagctcacttccagcagctcattgaggatgccgagctgctccgcagtcgacttcatgccgatgctcgacgtgaggaggtcgcgaggactctgtacgtcggtgtcctccggcccgttgttatcgttgtttgggtcggagggcgaggctgagaagccctgccattcaccgcgctccttctggacgctctcgagcagcgagacgtacaggatcttggcctggcgggtcaccacgctgtccctggccgtctcgtcgaagtggccgctgcggttgatcactccgaagagcaccgaggccacggtgcccacggactgcgcgcaggatccgaacacggcgctgcgctgcatcggtctcagcttcagtctctgctggtgctgcggctcaggctccttcacctctttgagctgactggggtcggcttgcggctcgactggacgcttggcgctggcggagggcggcggcgactgcgacgcagctcgccggaagtacttgcggatcccaaagcccgatgtcgacgacggggccgatgacgatgtggggtcggcgccgcgcgctgccattcaacagtggaagcgcgcgcaactcagcgcgcagcagcaacgcccgcgatcgagcggacggggggggcaagaccgctctttctcaagttgcagtcgagtggccgggcgcggcgagatcttggcaaaaatagaaagctcacgccagtgcgaatacatgtaatggggccccgagtcgtatggagtgcttgcctttgctgcatagggatggcctgcgctacatgctgcgcaagagagcgaggtgcacgtgcttcgttgccgatatccgaaacgacctgacatcgagatggttcatgtacaggctgggacttcgcgacgaacgtgggcgctgccattagcattagttgatggttggcaaggcacgttgtgagagttacactaacatgcaaagtatttagtcttggcctacatgtgcatggttgtggcgaggacaccgtgtgtaacacgagcattggctcgctcagtctgtagtcttccttagcgcactactgccgatgacagttcactaacccattgttgaacctgttcttgccaatcaagtcgtagcgcctgtgacagcactggcagggaatgggctaagcaggttgcagtaatggtttccgctcggacgccttccttgaccagcataccctaagatacgtcttgcttcaagcagcaagtcgggctgatttaaatgatcgccatttcggtgaggcagacacacagatctgagcggcgacaagatcgatcgactcgctacaggaactcattgcggaaacttacatatcttggtgttattatggacacgcacgttgcttaggcaatgactgcaacgtgccgactcactctgcctacttggcaaaaacgaactgcatgccgtatcgatgacatatcacactcaaacggtgaggagcgtggcgaggttgcacgacgtgttgaggtcgatgcgctcggtgctgtcctcgtagatgatgctcatattcatggtggccagcgcgtccttgaacagcgtgtactcggtcgcgtagctgctctcgccagtgatgaagtactgcacgtagctgtcaatgagcgccgtgaccatctcgaccatgtgcgcgcggttggccatctccacgaacaaccggaaggtctgctggctcatgccacgcgggacgccgacgtcaggggtcaggccggacaagtagcccaggtagtcctggttgacgtacagcgtcaagttgaggtatccgatgccattgagtcccatttgagagacgttggtcacattgacgtcgatgtccatggtccagccttcgtccgtgcagccccagaagtcaatgtggtcgatgaccgtcaatgggtctcggaagttgttgaagccttcgatggtgagctcgcgcttgaagtccagcccgccgtagctgaagcccagagcgtgtgccttgacctctgcgctcgtgtcgaataccaccgagacgtcgtccatgacggccgtcgacatggcggagaacacgtcggcgtcggtgacgacgaggtcgctggtgatgttgaggtcgtactcctgctcgcccttgtcgatggtgagcgcggggaactcgaaggtggcgaaggtcgagccgccgtagagcagcttggccgtggtggagtccgagcgagcgttcatgctcaggtcgtgcttgaggcgcaggctcagctcgctcgagagcgtggtctggtccgtgatctggttgatgtcgaggtagttgacggtcatgttgatcttgttgacgttgtgctggaagatggccttgacgatcacgaaccacacgatgaggatgatcacgaccagcagcacgatgacgatgcccaggatggcgaagatgcgctgcttcttggtgatccgccaccacaggaacttcttgagcggcttgccgcccttctcggcctcctccttgagcacgtcctggctgttggcggccacgtccaccttgaaggccgagtccggctgcgactggtactggtagtggtccatgtccacgttggcgcgcgcagggctctgcagcgtgtcggtcacgggcgtcttgacctcctgctggtacgtcgccatggtcggagagaggagcgggtatttagatggagacttgcggccgaggcggcaggttagcgaatgacagatctgccaagcgcgactgacagaccgctacgcagccagccagcacctgcaggcgggaagcagtggagcacctcgcgcttcttcctcacggcgggttttccgcggccttcacctttgactggcgccgagtattgagcgcagccatcatcactgtggcacttttgggggatgagcgagacaacttcaagatcaatttacacggttgtagagcacattctacagttgcagagcaatggtctccgcaaaacaggccgctcttcaaggaccgccggcggcgtgcgtctgagctgcctggcccaaggccagtggcctttagagctgcatgtactgtggtctccataacgcgagcttcgccaccgaaatgctgtcgtcttcctcgcgcaacaacggtggagcaagttttggatgagctgtgtcggcgcgcttgccgctgatcgctatccgcaagagcatgccaccgccggtactaatggcgcttgtgcattccaggatggttgccagtggcactagtgacgcacccggatcaccgccgccttgaacacttaccagcatccagtagaccgctggaatagggcgcggcccagaactgctgcgcggtgcccgacgagctgcacgctaatatgcagacaacagtggtggtgggctaatactgcagcgcgcgatcaccaagccttgctgccgtcgaaactgaagtactagagtactgtacacgtccacccgtcgcgtgctctccaagtgtgcgggcgcagcaagcaagcctcggtctcatgatattccttcccgcgcgatcggcaccgccgcgtgtcaatgccgtcgatgccgggggcactctgccgcgactgcacagccaaccgatcaccaccgttatggttcaccatggttcgccttgcccgtcgcgactcgcgagtcctgcgttgcatgcggccgcttactccagcccggaagcttacaagtcggcttactccactgggccgttctctacgtgcgtcaagtactgtgacagccgtggttccggcgcatcccgctcagttgaagcgggtgcttgtccgtgacaatttgcccctctcggttttagccgacgtgagtgcccgccgtgtatatcggcggagagtggagataccggctgcaacttgcagcctgcttcacgcgagttcgcgtgtaggccccatcttccggtaaagtttgctgtagtgttcgagcatgtgttcaagctcgcacacgagctgatcgagctctacggacgaggcttgctgagctgtttggcagtcgacaagcattttgcccttgggcccaagtggttccacgcggatggcgttcagagcgagcattggcgaatgttaaacgcgcggagagtgataagcacattggtgcaccgaggtgcgatttggccggcgccaaggtggcaacagcaaagagcgcttgtgcgatagtggatgctaccggtacgtgaaggtaagcactgaaccccaagtctggggcggcttcaaggcaagtcgccaacctgccgacttgccatcctgatttgcgaaataattccaattgctcttgaagtgaacgcagaagataccgtgctctctatctgtcagaagttgaagttgctacgaactgttgcttgcttcgctctggaccagcagagcaatcgaccgagttggcctattatgtacagcaggtcgtcctcttgctgcatatggattctacggtgagattggcctccgaaatgcctgctccagtctcgtcgtgatgactcatcgctctacctgcagggtctactcccattgatcaagaccaaccttcacgactgacgcattgcgaaacatttgtttggggggggggctgccaaacctgtacactttcgtaattgtttaagattcgccatccatttgtaaagcgagtgcaatcgtcaatacacacacgtacgtagtcggctgtcggtcgccgattccgacacaccgctgaggtagccgctcgcactctcctgaggcaccctgtaggtctcaccatccacctgtgctttgccgacagacacactcggtggtgccgattgcgtgggactttgatctggaatctcttcagcttgccctgcagcatcgagcaccctgttccgtaggtctactggatgctggtacgtcttaacacccgccagtgagcagctgccgattggcgttgcggctgtgaataccggagatggagcgcattattttggaactccccctgtgcgtacctaaaatcgtcgaattcctaataatctgtcctaaacataatctcctaaaatcttgcctaaaatccggagagagacacattaataaacatcttatattcagtatagcttggcaggacactcgcgcattggctctcgtctgcggcttagcgacaaggccgcggggggggggggggggcgccgctacgcggcctgccccaccccttgtcccttacgctaagtcctcgtctcggccaggcgcggtgtctgaaaaaaatatatcgggttgcagcgctcgccttcgctcgctcgcgcagacacgcccccgcctaatcggcgggtgttggcgatcggtgaatgcaccgagcgagtctcgcgctcgcatccgctcgccctcgccctaatgttactcacggtacttaattttcaagcatcttgacctaaactcagtcctaaaatttaggtggtgcacatgaaacatatgtcgggttttaggaaaaatccttaagaatacgacgattttaggtaggagcgttctcccaccggcagcgcacactcagagctttgccttttttttaaatacctattcgcaacgcccacccactgtcggcgacagcacaacatccatccatgacatcctaagcgcgtgcgctatcatgctgccgtttgcgcagcagccaacttgtctgcctgctttttcttcttggcgtgctcggcaatgcgctccttcagctccttgatctccatgtcggcgctcaacagcaagttcttggtgtcctggatttccttcgtcacgaacgtctctgcgtgcgccagcgtcttgagcacctcaacgtccgagtaggtcggcagatggtcctgcagggccagcggcggcgcctggcggtccggtccggccatcagcttcttgtagaagaattcggtcggctcgttgaacacaagctcgtcgtagaactcactcactactggctgcaacggcaacaacgtcaaacaacatacacacacacatcaatacactacctccaaactgcagtaactaggcaagctttcaccttcttggtgctggcgggctgactattgggcgggtacagcaccagtaagtggatgatgctgatgggccgctccgtcgggtcgtggaagtagatctggatgcgcgtctcgaactctccccagcccagctccgtcacctcgtacggcggctccgtcagcacgcgcacggggttcgcgaagctcacgtgcaggctgatgactaccttgctgatcatgtaggacaggtcttcgttgtccatgccgcgcagatagatggaccagcggtgcgtcttggtctcctcggccttgcgcccgaggtacgtggccaccgacccatacaggatcggcttgcttaccaccacgttcttctgccgcgcgtccgccatggtgctggagtgagaggcttcctgggccgacagactgaaacatgattcgccaaaacgtttgagctcactgattgggtgaaattggcatttaccgcactttttcaaacattctgcattttggcgggcaagatgaagcggaagcacgcgaccggcgccgcacacgccgcagcagcaagcgagaagcaacagacgtcgcccgtgaagaaaagaggtgcgttatatatgcattaagacatacagatagcagacctcagtgaacccgagtgcgctgggacgtcttcagtcgctgaacacgcgtagcatatttgaatttgaatttgaacgtattcgtcgcttacgcattcgattctgatggcctgcgcggcgtttgacagtgagggagtcgaaggataatggcgaagcaaataaagaactgtcggagccgctggacgagatgatcgatgtccaaggattcttgttgcgggattgccgggcctcgtctaaggtatgcttgtccgcagggacggttttgggtggaatacgacagtgtacttacggtgtttggtctgcgcttggatttgcagaagctggtagaacaagcgaagctacgagcggaggagctgagacgagagtttgaggctggcaagaaagtgctgttggatgccctagaagccgagaaggagaacttggagcaaggtaaggatgatgtactaacgttagtacgagaaagaaatcgagggactattatgctgatgctgttcttttgggggctgctgagtagatgacagttcgattccgcgagcattttccatttcagtgcgatgcatcactggaccgtaccgagggcgaaagtttcacatggatattgacgtggtaagctgctctcataccaaattgctcgtgctgtgaatcacagcacgtgatgcattctagcctcctaacttttcttcacacagaaacggcattcctcttgctttgtgggccgttcaactggccgaaagtttcgaccgcctcgaggattgagcatgccgaaggattctgaactttcaacgtcgcacggagaggtaactaactacgcgttggctgcattgtgcccgaccactttgctttggataagctgacgttgttgtcttctttcacgtgcagattaaaatggaggcgacggggaaaatcttcttcgtcgacaccgacagtacaaacggtacccgcatcaacgacgtggagctggaagcccacgagccctatgagcttaccgtagacaagcccgtcaaagtggaggtcggcgcaggcgagtacgagtttacgttcgagcagaaatcttgaaagtgacggcctcttcatgcgctcaactccccgatagtgcagcaagaccggaaacctcaagaagcggcactgaatcgctagcggttgttgaccaccaccctatagtattatattccgtgttcttttttccaagttttctcatcgacttgtgctgagctcgccgtctagcatctgaatcatcatctgtgcacctggacgtgagcattagcccagctctaccagtccacacgccgaggatccctggacgctattgctcagctcagctcctcctaaacttccgactgcaaaaaaaagatagcgctgtgctcgcctcgcttttctcaagcggacaacatctagttggagcccgagatcttgtcctttatgtcgcccacagccttgtccgtcttgtccagcgcggcctgtgcttcggcgttccccgcgaacgccagctggcacgtcgtccagctcgagccggcgccggagcccgcgcccagacccgtgatcagtccacgacccgtgccagaacctgtgaaatacaaagagaaaaacactcgtgtcaattgcgggtcttaagtttggtcacccgcctgggacctgagcgtcgaggaaacgtacgcgccagcacgagggacgtgaggcctccagccacgaggccggcgccgaagtaaagcgtgaagttctccaggcacttgtcccacttctccgagatgcggtactcggacgggatctccttgttgtcgctcatggtgctctgctcgtgctcttcctggctcggaatcgatcctgccctgttcggacgtgaggaccgcgcgataccgctactttcagccaatcaccgtgttgtgtttcatttaagtacgaaacacaatttttgtgtacacttctgtcacttgacttgagagcaatggacgaggagcgcgtcgtgctgctgggcacgatccaggagcgccagagcgtcgacaacgcatcgccctatgtgtgcaaggcaggaggaactccggtaggtattggatcaaaaccgttgtggactggctcattgtttttatattgaatgttgctgttgacacattggccctttcgacgttttgatgggcttgttcaggcctggtactcggagccgccatcggaggccagcaacctgacgtgtgcgaagtgcggcaaaggattgttcctggtcgctcaagtgtacgctccggtggagaccgaccggacgttgtatgtcttcggatgcaactcggtggcatgcacggagacgcccggcagttggcgagtgttgcgtgaccaagtggagcctgtgaaggaagtaccggtggtagctgaagtcgaaacgttgaccgagcaagtggataaggtgaagctcgcgtggggctcggatagcgatgacagcgactggggtgacgacgaagacgacagcaagccgcagactccagcggctgatcttgtggatctcgaggcacttctacagcagagagatgatgctatgaagactagtgcaaagaccaccaaggcggctccagcgccaaagaaggcggatactgcgaagaaaaatgttccggtgggcaagcaaaacgcctttccagctctgccgattgaagtgatcgacgagccgtatgaagactacacggccgagcacgacttcgcgcacgagaacaaactgctcgagcagtatatgaagcaggaggaagaggagaagtccgccgatatcggagacctacgtactgtgatttcgaactcaaagaagaaaggagcgggtgctcaagcaaccggagctgcttcttcaactggtgaatcgtacgagaaaacacccgcacagcagcgtcatttgctgcgattccagaagcgcattagccgttgccctctgcagtgccttcgctacgactacggcggcgagccgctatggcctgtggtgattccgcagaacctcaaggtgccgaactgcccaggatgcggcgaagaacgctcgttcgagatgcagctgacgccgacgatcaactacttcctcaaggtggacgagttcgcagcagccgacactccgtcgcagcagaagtctgacggcatcgcaggcgacgctccgaaagcaatcgcgcctccaggcggcatggactggcttagtctcattgtctacagctgctccgcaagctgcacacagagccacgaggagttcatctacgtagtgccctcgcccacgtcctagatcccattacatgtagagcaattccatacagtactcgacttcatcttggtccatacaaaacccatacggtgttgtcaagaccgcagtagtcgtcgcacgaatgttgcgtgtaaatcgaccaccattcttcgcgcaacatttccttcgtgcgacatcctgtcatcaccagcaatcctcaaccgctcgccgacaatgcgggcgatgcgcgtgcggctccttccgcgttctggcgcctctgcgtgccgcagcaccttgaaacctttgcgtcctcaagccctcgcactggcgaatgcggtgccgacgcgacgcagtttctccttcagcaccacgtaccccacgcccagtgaatccgcggccgtggatgacacggatgacaaatccgcgcctcggttggtctgcggcaagtgcaacacgactctgagcgccacgaaggacctcgtcttcttcaaatggtgcgaatttgttatcgtcgctttgatatatttgttgagagactcgccactaatttacactgaatggcacaacgaacaggaggaatgggatccacgtatctagtgcgacggacgaaccgctcaagaacttgttcccagaagagtcagtggaggaagtggattcgagctggaggaagcacaagatgctgtgcatcaagtgcaactaccaggtcggcacgctggcgcggatcttttcgtcggacaaggtcctgttcagctcgtcgtgcgtggcggtgcaaatgccggaggaccagtcgccgttgatttcgttgtcggggtacccttcctcgctgctcagttttacgatgtggtcggagttgatcctgatggcggagacgcagcccaagcttaaggacttgttgcagatccgccgagtcgacaacatccaggagtatacctcggataatgcacaactgaaccgcaaactgctgatggcgaaggacttgcaagagctactgcgaatggtggaggaaaatgtacgtgaggatttcccgacgcagtggttgaaactagattggtaaaggcaactaactatctggccttgcgtactacaggtcttcgacttgaaccaatacaacatccgaacggcgatcgaccgtgctggccggtttgtggcaacgcgaacgacgcgagcgaatttgctggtaagagccctgaactgtcgaggcgttggtggagtattaaccactttgttgtgtgtgctgtaccagactgtcagtcacatcgacagtacaagcaaatcggaagcgcctgaagacgatctactcgcagttccgtcgccagcattgttccctaaatggtcggccaagccgaacgcgttggatacgaagaggtgagctgagattcagtcggaagtacgctggacttcgtttctcatgttggttaactgtgatcagattctggaagctgatcgacgagactgaaaaactggtgaatttcggcattgccgcctttaaaacgggcagtgcgatgtccaatatcacgacggcactgatgcgcctgggcgtcggtcgcacctcgattttgcagtacgtcaactcggatcaagttactttgtggtaacgccaactaattatcctattctgcctgcgtattgtatcaggcctgttgcggcgcagactgtgtatatgttgcaaagtgagaacccaaaaattagcgcacatgaagcatgcatggtggtaacggcagtagcccatttgctgccgagggaaagccgcaggcaggaatgggttgtggaggctttgcgagccacaagcaagtcgattttggccgagttagacgccgaaaacacaagtgcagaggaaaagcagcgagccgcagaggtgcttgtgccgcttgctcgatccttcttgtttgtggagagcttcgacgaggatctattccgacgaatgtttaaggaggtgaactctggcgcgctggacaagctgaataagccgccattcaagcttcgagtcctcaagtcaaagctgtaccaggttcatctggattgcgagctctacgaccgacccagcgaatttcgattgtcaccggcgttgaaggatgagtgcaagcgcgtgttcgacgcccaccagaagaagggcaagagctcttccttccgcctgcaccaccttgtctctacggcgctggatgagatcggaatgcaaaacgagacctcgtacgctacggagacgggctatcacctcgatgtcgtggcgccgaagcagaagatcgctattgagctcaacccgtcagactgctaccaggcactggaacctggcaacgaagacaaggatcccaaaaccttcgggttcgtggatttgaaggcgcggcacctcgagatgttgggctggaccgtcatccagctgcacgccgaccaattccagcagctcgaaacgctagaggaccgtgtgatgcaccttagtatgctcttagaaatcgccacctgtcgcgagcagaaggcaaccgcggctttccgggcgcagtccaaagccaagaagtgagcacagcattgttagacacgagaaccacataccgatgctgccctgttatctcaatgcaacgtgaatttttgctacttagtggatcggcgttgatctcctcaatgtgcgcagaccccagccagcgatgaagatacatgtatcctgtgctactcggagtgcttggttttcttcttcttgtgtttcttgtccttcttgtccttcttttccttgggtttctcttcctcttcggcggcttcctctcgcttctgtttcttgtgcttcttcttgtccttcttggacttgggcttgggggcgtcctcctcggcgctgacgacggccgcctcctccttgtcgtcctcgacagcggcggccttgtcctcgtcctcggcctgctccagtttccgcttcttgctcttcttcttaggagcctcctcagcctcggactcagcagcagcagcagcggcttcctccgcagcacgtttggctttcttcttcgccttcttctcctttttcaggcgcttcttcttcttcgagagctcctcgctttcttcctcgctgtcgctgtccttcttgctcttcttcttgctcttcttcttgtcctttttggccttcttgtcgctcacgtcttgctcatcgtcttcatcctccttgtcctcctcccagtgcttgtgctggtaggtaccctctccccggcgcacgaacatggagtagaggccgttgttgggcagtccatccgagcgcttgacgcccttcctgccgcccagcgaagcgaagcccaggccgccctacaaaagcgcatccggcacgcaaacgcgctcccgttcagtctccatgctgcctcctgtaaagacgccgccgactcgcgcggtggcgcaatcaaagaacaccaacaacaagccctaccttcttgccgcccgggcgcagcttggagagcatgtcatggagccggatgagcttctcgtcctccatcttcggtcgacggtcgagttccagaaggcggcgggtagttcgggacggacctgtccaggcgaatggcaggcgggcagcggtgtcggcaagagatggcgcacttgctgatcggccgccagcaccagtgcttcgagcgagcagaccagcagatccgatagtgacggactcggatacggacaaatatgatcgatgacctgaccaatagtggagaccagtggaaatgttacctacacctgacggacacgtcgcacgggaccactaaagccagggacgaggttttatcgacgtcgccctgggtttttatgcggccaggatgatgtaaattcggtgagccgcatcccagtcgcagcgtggcatgagaccggcctggacgccttgccgagggcggcgaccacagcgcgataacgctgaattaattatactggcactcgcgctgctgcggacactcgactctttcaataaaacctgaggggttctagttcaatcccgaggaaatcgtgctcacgtcaagggtgccgattgttccaaaatgttgtaagcaggcttgcagcaattcaagctgcctccgaataccggtgagaagagcatttatcgaccgccagacccgatctggtcgcagcgcagccttcggcggtctttcatgcgcagcgagaggttcaatttgggcagaattgatttgcttttttcgcttcgcaataaagtgtcgagctgttcacaattctacaagcatcaacgccttgaacgcctgacaaacttcgacacatgatactgtacgatcctggtaatcgacaccaccgcgtctcgtacaaccttgccgccgagcctagctaggcacagtggctggcaaacatgcgctggctttcgcggggatgatgttgatctatacaagtgtcgcctaaacttcatcctggagtccctcgccagtgttgcgctgaggcacatcagaaaaaatcgactcatctgcagccagttcgattcctttttattttgataattaatacttagctaaggctgtaaattaacattctacttaattcaaattcaagatttgcagttatgttcagatagcctgtgtttcatgatatcaagtcgcacttatattatcgcaggttcggcgaaaccgggcttgcccatcaccctgagctcccgcgttagcaacaggggcaggcatgacacgcttgacaggtgacggacgagggacccagctcaggcaccgcctacagctcttgcttggcttgggcaaggtcactttgcattctgcgcactcgagagacagcaccccggaccgcaccagcagcatgagcagcaccccgcaccagtacgccgagaaggtgcacacgcccgtggccgagggcgcgcactacaacgacgagaccgcgctgcggctcgacgtgtcggcgcccggcgccgagagcaagaaggacgacggcgacctcgccgtgcccatggacaagaacggccgcccgctggtcaagttcctcaagtggcgcatgacccgcaagcagcgcatcctgctgatctgcggcctcgtggtcatcctgctggccgtgatcctgctcgtcgtgttcctggccgttatcccggccgtgatccagcactacgtcaactcggtggacctcaccatcaactacctggacgtcaagggcgtgcccagcgactcgacgctcaccgtggagctcagcctcaacgtgcagcacgacatcgccatcgccgccaccacggacgacatcgcggcctcgctgctgtacggcggcgtggccttcggctccgtggtcatcccgggcctcgacatcaagacgggcgagcaggactacaacctcacggtggacggcacgctcacgctctcggacgtcgacaccttcaacctcatggccgagggcctcgtggaggacgccgaggtggagctgggagccgaggcctccatcaaggcgcacgccctgggcctgacctacggcggcctgagcctcgagcgcacgctgcccatcaacggcttcaaccagttcagcgacccggtcccggagatcgactacatcaactggttcggctgcaccaacgacgtgtaccagatggacatcaacgtgacactctacaacccggccactatgggcctggacggcatcggcgccctcaacctgagtctgtactactccgacagctacctgggatacgccgaatcgctcaagcccgagctgggtctgccccgtggcgagagcgtgcagctcttccgcgccacggtgccgcagggctcgacggcgctcaaggccatggctctgggtgtcgtggccaagaaggcgcagttctacatcacgggcgacaacccgtactcgacgcagtacacgcagttccaggaggccatcagcaaggtcaacatgagcatcgtctacacggacggcctctcgagcctgggcttcaacacctcgtgcaacatcctgtcgctcctcgcgtaggagagcaatgtattagaccacggtagccattagcacagcaaagcgagcacggcttatacggtaataaaagtcagttcgcctccactcagcttcttcggtgttcacgagcgggttctctgcagcaaaggggatagccccgaggtcagctcataccgtacacacaccaagatttgactcgaacctgcgcagcaattttttgaatggtgaacgctttacgcgagccgtcttcgtaggactcctccatcgtgtagtgggtcaacttccgcatgcgtcgggtaactgcacagcaactgcacaatgcattcgtgaaagcccgagctttattgcacgccaaccacgatagcactggcgcttggtgtcggtggtccgtactgtatataagcacgcctctgcacaccatggacagcgtgttggtgaactccatccgtcgtccggagaaccccgggtgcgaactacttcgaagtgcctaatcgcagtcgctaaccaaagttcatcagactgctgaaagcgtgcaccagagtgagaggacattttagcataagcttacgtgtgactcgccttcacgaatgaatgacacacacgagccgattcaatcgaataatgttttcctgatgttgaattcgaccagtacgtgaacgctggtcttcggtttagcagcttcgcttgccaccaagacgacggatgctaacatactttacccagtgtggacattgcgataaagtcaaaactgacgcgatgcatcgattaaaggttagcaagttgggtatctcccatccgataacagtacttgcacagatcgtctacgaaagtagcgacacaagactgcaggacgagccgaaattcatgttggtgagcgatccgctgcttgatggcacgctcatgttgacgttgctgagcgcctcgacgaattggccatgcgtcgtaacgtacgggttgtttcccacgatgtagaactgcgtgctaccagccaaagaagacagcaccatactggaaatggagacggcgctcgtgtccacagtaatgaggtaggactggtcactcacgccacgaggaatgccgagctcgggcttctgcgatagcgcgtagccgagatactcctggccgtaatacacactcatgttgagtgctccgatgccgtccagccccatgcgcgccgtgttgtccagagtcacattgatattgatcaggtactcggacgaggtgcaagtagtgaactcaatgttctcgatcacgggctctgggtcgctgaatcctgtaaagccctcgagagggagatctcgctcgaagctgaggtcattgaaggacatgcccaaagcatgagcatcgagcgaagcggtggccgtcaacgtgatctcagcttggttcatgagggcgtccgacatggcgttgaagacgctctggtctgtgatcggcatgtcggcgtcaatggtgatgttgtagtcctgcgatccagtcttgatatcgagtccggggaaaggaagcgtggcgaatacggccccattgaagagcagagagactgtcgtgctgtccgttgtcgcagcgatgcctacgtcgtgctggatgttcaagctcagatccacggtgagtgtcgagttgtccgggatgttcacgatgtccatgtagttgagcgtcatctgcacactgctggcgcagtggcggatgctggccgggataatggcgaaccacccgatgaggagcagcacgaccaacatcaacagcacaagccccacgatgacgagtacgcgctgcttcttggtcatgtaccaccagaggaacttcttcagcggcttctcgtccggcacgagcattacgtcgtggctttcactctccttgcgctccttcaggcttgcgccgtcgacgttaagtcgcacggagaacggttcgcggtacggcacctgcgtgctgggcgacgtcgccgccatgtcctcgtgctctcttgccatctcttgtggaattgccgcctgtcgcgatcgatcttcgacagtcgtagcaagtagtgaaatggagtagagcttcaggtcgcttcgacttgtcgggttctgtccacttttagtgcgtttgttcgggggtgaaacgaaatggatgacagtagcgctggcttcttgagcccaccgccgtggacgctcgaacaacgacggaaataactcgagtccaacgagacgtaagctctatcgcattactccttagctcatgatgacaccctgatgttgcctactgaggttactgctctctacaagactggacgtgtgctggcaacaacgagagcaaaagaatcgtactctggactacgcctggtcggtggaaatgctacctagtagcctagcaccgtcaggaagctggacacgcacgaagtgttgaaggagaccttgttgggtccgtcgtcgtactccactgtcatgttgaccttgctgatggcttccttgaattgcgtgtactccgtcgagtacgggttgtcaccacggacgttcacttcgatgccaccgctgaagaagcctgtaatgacgccctcaagtgcagacgagtcctctgacatgaccacgcggaaactctggttgctcagtcctcgcggcattccgagctccggcttctccgaatacgcataacccaggtagctatcgttgtagtacacactcatgttcagtgcgccgatgccttgcagccccatggctgacggattgttgattgacgcgttgacgtccatttcgtacactccgtcgctgcacccccacaagtcgatgtgctgaacctccggatccaaggtctggaacttgttaaaacctaccagcgatagcgtccgcccaaaattcaggttgttgaacgaaagacccatagcgtgagcgtcaacctccgcctcagctgagatcgggaccgtctcgtcctccatcatcgcctccgccatagcgttaaatccgtccaggtcggagatcaccatggtcgtgtccatagtcaagttgtagttctgcttgcccgacttgatgcccagcgcctcgatacccacagtgccgaacgtcacgccgccgtagatcaacgaggcgttcatcgctttggtcgtagctgagaccggcacgtcgtgctgcaggttcacgctgaaagtcacatcgatctccgtgtcgctcgggatgctagtgacgtccatgtagttgatgcttagcaccacttcgttcatgtagtgctggatgatggcggggatgatgacgaggaagatcagcagtacgataaggagcagcagcaagatcagtccgaagatgatgcacagccgcttcctgcggctcatgcgccaccggaagaacttgaccatggggcgtccgttcttgtccagcgggatgtcttcgtcgtccttcttgctgtcgacgccaggggtcgtgacttcgaggtgcagccctgtatcgttatgtacttatcggcgttcgcacccccttgtctccttcgtactggttcggggtcatgagtgcttgtgctctgtgcgccgctttcctgctcctgttctctcggaagcgagcctcctcttgacaccgcaaaacccgaagtgcagcaatatgagcggatcctgcctcagcgacagagatgccccctgtatcccatgcccccgctatatcaagcctgtcacagtgcaagcgttatcgtggattcacggacccacgccgatccagtactattactatacggtaatacccactgcatgcagtgggtattgcagtgctgcatgttgtattggagaggatgcaaaaagcgaggcttttcgaacaggggttgtgcgaagattcgctcattcgtattgagtgcgcacgtcccgcgagtctgccatgttgatggtggtcaccaatcaacgaaaatcataaaccctgagtttaaggacgagccaagagtatgcgtaacggattcacaagttttgatgatcttgaagccagggatttctatctgtataaatgacactagtgtcggttgtcaatactggcagctactacaggtcaaatttgtttccaaacgtgtgctcgtcccctttgtacttacttttgctgacgggccgacgtatctgcgcacaagtggatggcgactgccatcgttgatagactgctcatcagtatcaaggcggtgcaaatagactcttggtttatctcgtacatcgatcgccggtctgatcgcggaataatgcacgagtctgggtaaccattgtgcccgccagttgatggacttagctactgtacttagtaaacagtacgccgtgcctgcttcttttgggtattgttggatttggctttcatccagcttgccacggtggcagctacccgggtcactgaaggtcatttatacggctactagaatgcttgttcaatttaatgggaccagccaggcagttttcttaaccccaacagcctccaaatcaaggacaaaatcaaggaccaaaatctcgaagctaatcttgaccggatacactattgaagaaagccctgaattgccgctttaaagtttgtgcctcgcttagtccattatgccaaaaaggctataaacaaagtgtcattaataacatataacgttttcccttttgtccaatcgtttatacataatggtgcttgagcagcagccgagcggggcaactctttggacgtgctcatattttactgataagaatagcgtccctgactggcacacggattatctgattctagacgttttttgcacgcaaaaaatgtctgcaaatcgtttttaatgacgtatgtgtttttgtgtagaaccacatactgaattttgactcaacacgtttaatgctattataaaaaaacgttttgttctcataacaattcggtatttgttattaatctactgaaattttaaaatcgataactcatttttaattgtcgattccacgcaaaaatacacgtagagctgcggacttgcaagcataagttatgcctctataacccgaaaaacattcctacccatttgaacgaaaaccgtgtcaaagctgcagacggggtgagccaataaagttaaggagggcgacccattagaagtattacaaaacgaccataactaccaaaccaagctaacacacagttaaatatagctacatgatagtacgcagcgttttcggtttctttctgattgcatgcccatcaaatttagttttgttgagattttgttttggttttgttcgacttaaaaactaatactttcacgaagttaagctaacttcgctttttcattgttttgttcaaatgggtgggaatgctcggtatgaaaggtgggatttggaaagtaattatattaacttcacatacactttgcgaaaaagtaaaatctactaaccattaatagcaaattgtttttattatcctgttagcacttttcaataatcacgatcgtattatctgaacttagaaatccatacagcgacttgattataaaacctgaattttctgaatcggcttgcaaaggcactagactcgatttacgaaaaccactcattcgtaaatatagtcttataaaggtcatcgacgatgatggggtgactttagctcggttgggactcctggtccgatgagtaaaatcgaatattgccgatcccaacgacatcgttctgctgtcctatatagacgccacaaccctttgacatgggtgtcactcagctaggataaatacgctttgcgtgtgtgtaccacctgccagtacgacagcaaacttgagtacgccttccttatcgaggtagacgcgactgagaatagactgcacaagcctatataataggtctctggcgactacaacatatacggttaccaaccccaagagctgtgacccatccctagccatcgaccttttaaaaccgagaaagagcttataacgcgcgtgcatcagcttgggttggcctacctctctatcgacaagttcggatggagcaagagagaactggtcaaatcgagacccgatcaattccccttgcttctactgaagtaccagtacgtgcgcagacgccaggtggatgacgcagaacaggaacctgttttgcccatgctgcggtaaggagaattggatgtatgtggctttgtgttcttcctgccagaggtgttgagaattttaaggcgggtcaggcagaagtgactatcgcgggcttaaggcattactggtacggcgcgcacgcattaagaaagatgagttgcctaatcctaaagatgatagcgaagttgctaaagctgctcgtgaggctcaaggcactgtccgcagggtcgagtatcttttccggacacgagacagatatgtggatgggattgccacggcaaagctcggagagattgcagacgtgatgaggaagcggtacaacatgtcatgtactaaagggtttgcgtgcgacaccttttgaaatccgagtacattctcaagggcaagttacacaggcgcatcaacggtccggactacgcggtaatggatacgacatgtatggagaaaggaagttttgtgcatacggagattgtggacccgtcggacggtgcaattctggagcccaagtccagtgagcccaagcgcgacggccgagtggaacttcacgtgggtttgtttcacgagggcgaacaaaaaaattattcgcgaaaatgattttgaagaaggcagcaggcgacgaagtgcagacaatagctagacttttacgcggcgagcagatggagtggagttgtcggagagcacaggccatgatggcatggtgtcgtatccctatatcgtcgctacagctcctaatgattcgctgacatagtctccactgggccggggggggggggggggtaactttgcttgcggcagtgcgctggtgcactcggacttggagctgctggctgcgctggaggagtacgctcgcttgtatgcaccagcttccagtacaacggcaagcttgagtacaccttcattagctaggtaggtacgagggaggacagaatacaagagcgtatacaataggcctctgatgattactgcatatacagactccgcccacaaactgaaatgcattttaagcgaatatccttcccaattcgttcgttattcacatctcgttgcagaggaccccatactttctgcaatttatacaaatgtatctatagagtctatgaagcctgtaatgcctgattcctgcactcaatgtattctctctaagagcttggaaggtccaccctctcagtttgtaaacggaattgatatatcatattgatacttgatcttgatcctgaattcggcacactgcgaaactactgtgtctaaaactactacaggaatgtgcttcaataaagaagattggaagctttataaccttctaaactctatcccgcagctgtactgctttgtgtacgaaagcactcatacaaaatacttgaaaattgtaaaccaatcaggtcatctttattgtggcacatcactatatttcgttgcaactgttggccaagtgaaaataatgtatatttcagataatgaataccgttgttaattctaataacaacatttaaaaaaacagttttaaaaattgcccattatgcgatgactgatcacgtccagtttgtgacgtgtaaaaccctcaaattattcaacaaatgttacgtgttcgggcaaaattgttttacttcaggttggttaagagctggtcgcgctggctgttacggtaacagagatagcctgcttcaaaaaacatgcgataaaacatacatgtacgagtacagtaatgtgcctcaataaacaaccaggtaacaacaaatagactggaagaaattatataacatattggaacaacgaaaggttcagatttgttgatgttctcatttatagtgattttgctgttgtaccttagttcattatagcaaactttgtcgacccttttaaccttctcgaccctcaaagtgttgacttgccgttatggctcgagccaaagcacgtggtttaccgtaccatcaattacgcttcattttgatcaaggtaatgcgccgtactagattgatatatgccccttctttattttctatatagcattgatagtctgctatacactatccatatcggaggttgtttattaagacagtattgtcaaatccgttgaaaatttccaaatcgggccgatttcgaaaatcgaccaatacaaattcaagtgcagatcgaaaccgctccaaacaagaaatgccatatgtaaatcgtacttaatcgagttccaattgacaatccaagtggccggggcgattggggagcgatttggctcgggcgattgcaatcggccggttcggaaattttgagtagaacccacaatactgtatttggtccaatcggtgtcggagctaatgtttatctacgaaagttacgtaagtaatgttgtctgataaactcgcactgtagcgcatcagatccatcagatcttttagctaatactagtacagtgtttcagagttcctacatacacaagcttttctccctcttctgtgtacatgtagtgctgcacttcaacgtgttgccatcacatgttcgactggcgagaccattcactttagtgactacaacatctcgattgcgagtcgctttactgacatcaacttaccctgtatttttacctgtacctgtgcttttgtaaataatatgtatattatgctcgtgcggacggcgccatgaggcacttcgcagcaacctgggataggaggctccaagttggaacacgccagtgcaacggatcagtgcgcgttttgcacccgagcgcgccagtctctccgccaccgccaccgccaccgccgaaactgacgcggctatgccaaagcacctgaacagctagcagggctcctttcagtagtctgtccaccgccgcaacggtgccggcggcagccttgccggaacatcaatggcagcagtggccttgccggcgacgccaacggcagcagaagaaaaatgtgtagggcttttgcactgctcgtcgtttttcatagcttttagtaacgcggttgccgctgttgcactgcatcggttgcagacaccatttgccgacagcgatgtcgcaatctccgccgcatccgagggatcacttgttcgctggacaagttggcgtcgctcattggctgcagcgtggaaataggtgcactcgtacccctaaatgagtcaggttacagcgaaatgagtactggtcactgcagagttgaccttatggtgagatgaacagtggcagtcaaacgaacgttgcggcacgtttaaggtgcttcagttcaaattcagtggggccacgtaggcagccgactacataatgtacagtagggaggacgctcgttggagacagatctcccaacgcagaatgaattggctggcgcacgatggtttgaatcgacactatcgcgagtgacgtcctccgcttgtatttgtatttctttagctaacaaaggtactgctacaaaggcagccgttctgagtgcgtgacagcaacgaaatcttcaagccccaaattggacaaggttacgtaagatttgggcctggggtacgcgcgccgtctatgacctacggcccttcgcgagagtcattggccaattacagccaccaatcagagcgcgcagtaaggcaacgcagcgccggcaaaaagtctcaggtaaagcatcggccaccggcacctctggcgacaccaggcccgctccgtcccgccccgccccgccacgccccgccgcacaagcggaatctcgacgcaggttacaggacagctcagggacgaccagcatggtgtgcagcatcgaggactcgcagcgcgtgcactacgccgaggtggtgctggacgacgcggccacggcgccgtcggtgcaggagcccaagcgcctgccggtgacggtcgtggacatgcgcagcagcggactggccgacgcccaccagtcgcagcacgcacagcagcagtcgcatccggccaagagggagcagggcagcatctggctgctggcctactgctgcgtcggcatcatggtgtccttcacgctcaacggcgtggtgctcgagaagatcacgacccatcgcgtgctgggcgagctgtccatgaccttcgtgttctgcgtgttcaactcggtggtggccatcggcctcagccgcgcgcgcaaggagccgccgtccaccatgccgcagagtttcctggttatcgtcggtgcactggcctttggctccaccatcgcgtccatggtggcgctgcgctacgtgtcgtacatcacgcgcatcctgggcaagtcgtgcaagtccatcccggtcatgatcatgggcgtgctgctcggcaagaagtacgccttcaagaagtacgtgtcggtgctcgtgctgtccgtcggcgtggccgtgttcctgctgggcaccgcccacgagaagcaccaccgcgccgcgccgcgcaacgagagccacgacagtctgcctgagcaggagcgcacccccaacatggtgctgggcttctcgctgctggtgctgtcgctaatcttcgatggcgccaccggcgcactggaagacaagttcatggaggcgtaccacatcggagctttcgacctcatgtactacgtcaacatctacaaggccctcttctctgctgccggtatggtcgtgaacggtgaagtgccagtattcctgcagtatgtggtgccgtcgctgcccaacctcatgatgctcagcttgacgggcgccttcggccaggccttcatcttcttcaccatcagcaagtttggcgcgctgaccacagctatcatcggcacgtgccgtaaggtgctgagcatcgtgctgtcggtgttcctgttcggccacgtgctctcgatggagcagaccgtgggtctcgggctgtcgttcgtcggtatcggcctcaactgggtcaacatgaagaactgcttcgccaagtcgtcgcctccccagaccgccgcggcagagcccatcgagctggacgacctgtccaaggagagtttgctggagagcagcagtgacgacaccgccgactccgactccgacgagcaggatgtggtaatctcgacccacgacgccgctgaggacaaagcgatgtcagcagagactgcgcgcaagctggaactcgtcaatgcctggcaccgtcagaccgctcgtgaagctgaggaggcatcgtcgagtgacgatgacgcatctggtgctagcgacgtcgctgctcaggttgtttagatcggagctagctggcctaccttcgagaaaataatataccccaccctatttacaaagtaacagtttgccactttcgttttcaccttttcgccatacctggcagcgtcagcaacacatacaaccccaacgttcgctcttactactaccaatactgttgtagtaattcgcaggtacatgtaggtcgcgaaaccgttggggggggggtgcatcgacagaacaagcaacaaagttcatgttgtgtcagctgcgccaacacagcagtcacgaaccgaaagaactgagcttgagccgtctggccggactaccagtcgccattgcacgaacgtcagaagcagtcgatcgatttcacgtcagttgtgttgacgctcggttccgctcgagcgtaaagagagctgatttacctacgattattatcatctctacatgtagtacaacctgcaccttgctgttcacgacttttgagcaccagttcctagcgttttcggatacctcgtcatcgaccgatgcggtcttgatttggagtacagcttcagactgctcttcattatggcagtctgctacattacaaaccgttcagcaggaacaacaccttgttggtttatgccacgctggactacgccttgactgtcaaggtacaggccgtcatcatggaaatcgcccgaggaattgcgttttcagtcttgcgttactgacttacaccaacacgaacacccggatagaaggatgatccagcggtatctaagtatcaaccttttccccaaaaccacagatgtgctccttaaacccaataaatttgttagtcagagtacctttctcgacttcccaggcatgtttcctttgcgtctcggttgtgagcgaaacctcgtcgtatctgagtaaggcagccacgcttgccacttccagcacgcagtttcatgaacctgaacagtcaacaccatttgcaccaacttggagatgcttggataactctcgactcctgtgacagttgacactgaggatacaaagcacctgtgctgtccgtccaccaagctgcttggcttgataagctgccatttcgttttttgcggcgccgagaggaagctcgcctcacttcaccaggtggctagtgactgcaaccaaaatcctactaagcatgactccgaatcagtacgagggcagggaggtgcacacgccggcaaggacacctgcgatggaggacgcgcactatcacgacgagacggcactgcgtcttgacgccacgacaccggaggctgaaaacaagaaggatgacgaagacatcccgctggacaagaatggccgccccatggtcaagtttttccggtggcgcatgagccgaaagaggcggtggtgcattatcatcggtctgattttgctattcctcattgctgcgctgctcatcgtatacttcgtcgtcatccctgctgtcattcggcactacatggacaaggtggcgctcaccatcaactacatggacgtcactagcatcccgagcgacacggagatcgacgtgaccttcagtgtgaacctgcagtacgacgtaccagtttctgccactactgacccggtgacagcatcgttgatttacgacggagtggagttcggcactgcgggagtcgtgggtcaacacattgagtcgggcgagcagaactacaacctgactatgaacacgaccatggtgatattggacgctgaggcattcaacgcgatgtcggaggccatgatgcaggaagagaccgtgccaattacaatgtcagcaaagatcgacgctcatgcttggggtctgccgttcaacaacatcaagttcgagcgcacgctgtcgctggtgggtttcaacaacttcgctgagctagacccggaggtgcagcacatcgacttgtgggggtgcagcgacggagtgtacgaaatggacgtcaacgcgtcgatcaacaatccgtcagccatggggctgcaaggtatcggcgcactgaacatgagtgtatactacaacgacagctaccttggatatgcgtactcagagaagccggagctcggaatgccgcgaggactgagcaaccagagtttccgcgtggtcatgttagaggactcgccagcccttgaaggcgtcattacagggttcttaggcgcgggtggtgtcacggtgaacgtccgaggcgacaacccgtactcgacggagtacacgcaattcaaggaagccatgagcaaggtcaacatgagtgtggagtacgacgacggactcaacaaggtctccttcaacacttcgtgtgtgtccagcttcctgacggtgctgggctactaaaaacgtgtacagaatgcaatgagttacataccgaccgaagtttgcaatacactaatgtagcacaattccttcttgccttttaggaatgatacacgtcgccatcacctctcgttcactaaggcaaggcgcgtggctcagcccaatacgaaagccccgcggtggtgcggtggatgaagattcctcgtccaaagcacttgaatctcacgagttgagtgccatctgctggtcatgagcaaatccggtggtgcgatcctctttcatcttggtgcactttcaaaatgggcgttgcagacgaacgaacgtcaacagcttcttcctgttgtctgcgagaatcccaccagcaacgcagcgcactacgattctgcctttaaaccagcccctatcgcgtcaccaagctccgcttccagccaactggaaaatggtgcattacgcgttggtgcaccaccgcgattgctgtccagtgaggtgttgggactgctggcacagtacgctggtatcggcttcgtcagtggggtactgcccgctgtgatctacccgctaatgcaaggctacctcaacgctgaaggaactaccgtggtgtccgccaatgtgctggttcatctcccgtggtcgtacaaggttttcttcggcatcttgagtgactgcttcctggtcgcaggttatcgtcgtcgaccgtacatggtgcttgggtgggctctctgctgctgcatgttgttcaggatggcaagcttccccggcaccgcgccatattatggagacccagcgatgcactcggtcagacccgagcaacggaccgagtctcagcgagaaagtatcaaccacggtgcgcctgatgcagcaggtcagtatgtacttccgatgacgctagcagccttcgggtatctgctcgctgaggtaccagccgatgctgttgtcgtggagtatgcacagcgagaaccgacgacgacacgtgggcgtctgcagagctgcgtccacagcgtgcggatgagtttccacgctctaggtgccttcgtggttgcagtggctttcaacggaatcgagtacggcgggtccttcgaatactcgctgtcattttcgcagatgatgttcatgctcggatgcttgagtgttccgcttgcgcctgctgcgcggtattttttccgtgaggaacgggtccagccacccaagttcagtgtctacatctcccggttttggcaaattctccagcagcgcgccgtctgccagcttgcagcgtacgatttcctctccggtgtcttcaacaacttcaatccagtggcgtttagcaacatcaagctctactgggtgcatgccacgcccttcaatgcgagcatcatggccatcattgggactttcgtgtacactggaaccctcggagttatggcacaggccggtctcaactggaattggcgagttgcgatcgccgttacggtcttgttcggcattctcaccgacttaatcatgacgatgctggtcacttgggacatcaatcgtagccagtggctatggctcggcgcgccgatcatcgtgtacatccctcatgccgtgcagttcatcgtcgacaactatgtgatcgttgaactcgtcgagttcggctccgaaggcgcgctgttcggacttttgtcaaccacgtcacatgtggccgctccgttcggccgcaccgctgccaagctcatcaacgctcagttccacgtctggaaacacgacatccaggcggactcgtacacgagtcgccgggacgtgactatcaccatcctgatctgctacggcatgaagttgctctctctggtgttcttgcccctactgccggctcagaaggctgctacgcaagagctgcgtcgaaatggaggtgtgcaccggcgaatgggtctctgcatggtcggcgttctgctgtcggcattggcctggtccacgacagtcaacttgctgagtatgaacccgcacaccaagtgctggtccatcacgggagggtgtgctcccaaacattgactaggttagaaattatagagttgttgtaataagcccttcgttgcaagatcctattgctgctcagttgttgcaggtgctggcctctggttgccttgcagactttgggcgagcagctccgtaaagttttcgggtacttgtatcccgcgcttctgcagggtgtcgcactgtgcgcgcagctggattcgcatcgtgtcgatctcggtgtccgtctcgcggatctccatcagcagcaacaagttggtctccatgagctgcgcgttgtcgccacgcatcgcctgcagcctctgcgtcgcctcggccatgctggcaaattaatagcccacgcagtatctttcacactgatggctgtattcaatgtgaaacacaccaaaattctacctcctctttgattggtcgaaacccactcggtgtttttgtggccctgattgtcataacctcagggagctctccaagatgctggcgcgctcgacgacgaagctggtgtcggtgctgcagcggccgcagggcgtcaagccgctgctggctcgctccttcgcgtaagtgcacgctcatctcatctcgatctgctcgaaatctgcaccaaaatacctgtagaatcaccgttaaaactaatgttcaactggtaaatctgtggctggcagacaccgcgtcaacatggtgctcaaggaggacgtgcccaagctcggcttccgcggcgacgaggtgtccgtgaaggcgggctacgcgcgtaactttctgtacccggagaagctggcggtgtatgccacggacgccaaccgcgagaagtacaagggggacaaggagtcggtggacgagtcggagctggagaaggagcatgagctggaggccatcatctaccgcctcagcaacgtcgaggtggtgttcaagcgccacacggccagcaaggccgacgtcaagctgcacagcgaggtgaacgcgcagaacatctcggacatgctggagaagcagcacggcctgatcgtgggcgtggcccgcatcgacctgcccacgcccatcaagacgctgggcgagcacacggtcaaggtgcgtgtggacgacgcgatcgaggaggagtacgccgcgggcgccgtggtgtcggccgcggacgaggagaaggaggctgccggcgaggctgaggctgacgaggagaagaagcagaaggtgggcccgtccaagaagaagtgggtgagcctcgccattgaggtcgagagacggtagattgagttaggcatctcttgtccagcagtggaggtggacaggagcaggaaggtgctggcgggtgacgctctcaacagagaactgcggtggctatagagacttcctgcttcggggagcaccaggcttggtaatctaaggagcgtcaggttgtgttccattcgctttggctttcgtttacgctgctggttgttgcactttgactctgggggctttcgcgcaaccgtctgcgcgactttcgacacttggcgccagatggacacatgggactgaacaaagcctccacacaatcgaatttgcggagatgacgcttcgcagcagcaaggcgaagaagtcgcccgccaagacggcgaagcagcgcaagcccggcatcacgaccaagagcaagcccaagcccacgcagcacattctgtggcgcggcaagcaaatcaccgagttcggtgagacgacgcacacttcgtttctcgttggaatcgtcttgaaagcttgactgtgagcatgtgtggattctcctgcgaggtagaatcgcgggtgtacgagctcatttcaacggtgcgtccagtccaaacgctatgatatacgtaagctttggccggcaacagcttagcccgtgttctctgaagatcccggcaggaaaagtgagcacctacggtggtgtggcggaggcactccactctggcccacgatgtgttggccaggccctacgcgtaagttgcagttagcctacggccgaacggaaaaagagtagggatctctcaatgtttattgatgcagaaaaacccatttgcgcctgaagtgccgtgtcaccgagttgttgcggcttcgctggacatcggcgggtttcaaggtgagttgaaagagtgagctctgaataatggtcactgctaagcatgtgcacgcatgattctaggcgctactggagaagaatcgccttgcatccagaagaagcggacgttattagcaaaggagggcgtccgcttcactaaggagcacaaggtctgctgcacgttgaggtcgttgctcctgcataaattgacgatctaaacgctaccgacttttggttatgctgtacagatcgatgcttcctgtgtccatgagttcaagtaagcacgtggcggcgcctgagttctgcagcaccgattcgcgcatgagccgtattcatttacttctccgctatcagcgtacagatccactcaacaaacgttcttgtcttcattctaaagcttatcattcggctgcaagtatctccactgtccaacaggcagtgacccgagcttaagccctccaattcgtacgcgcttgagagccatgacccgcagtccgacgtgttcacacatgcgacgaatgtgtcggttcttgccttccgttagaatcacgcgcagttggttggcgttcagcacctccacagacttggcgcgatacgtaattccttcgtcagacgtcacaccggcacgcagcacctcgatcttcttttggatagcatccgtcatcgggtccagattgaggtcaacgcggacaaggtactccttctcgatgccgctcttggggtccagcaacttcttggccaccttcccgtcttgcgtgaagagcagtagacctgttgagttcacgtccagacggccacacaccgccatcttccacagactcacaggctccacgttctgtcgcggcttgacgcggctcagctcgcggcactcgttctcaaagctgagcagccgcactgccggcgtcttgttgggctccggctgggaggacacgtagcccaacggtttgttaagcaccagcgtgaccttcttgtcctgatgacgctgggctcggaagtccaggcggacgtcactgtcagcaggtaccttgagccagtctgcctgcacccgttcgccgttgaccaggacatctccagcctggatgtaggcttccgcttcacggcgagagcaaagccccttctgagccatcagcttcgcaagtcgaaccagacctccgccattgtcttgagaagagctggggttgttgtcgagggggttggatgcttgtagcagcgacgccgagccgtggacgcggcgcgtcaatgcaggtcgaagtgtcgcgatagcacgcagcatggccacacgaataatgacttctgattgggtatcactcctgttattataattcggtatcataaatcattggtacttcacatttgtatgaatagcttgatagagcactgacacacttgaatatgagaccgcgtcaaacaaaaagacgctaagccaccattggggacccgggtggtgggcccgggggggggggggtctcgcagttcgaagctagcttgtacggatgcccttacagggaaacgatgtactcttctttagttttgtacctgtactagaccgctattgtggatgcatgtcgctcagactagctgccatcgtgacgagcatcaataaatcgacgaatttatagcgctggtcccgccggtagtacattttacagcttgaacacgctgcatctgcttcaacttcacaagttggggagtacatacctggtaaagtgctttcggttcgtctgctgcaagctcaaacaaagatttttgtttgatggggtagttcggaccgataaaatgctacaaaatgaaaccaaactcgatgggctcttgtcgagatcaatcattcaaaaacaaaacatgcctttaaaaaacaaaagcggctcgaggatctaaacgaagcgcagttgactaagaggtcgcaacttctgccagcgtattggctagcagcaataaatcggtgtaattagttttcacttgatacatgcatatgccaaagctctacttgccgctgtgtatgggtataaagcgttttctgaaggaatcatcataaatatggatacatcgtattcagtgacaacatggtatcctgtcaatctcaagatagttttgcttttgcctaaaaggggttcggcaaataagaatagaaacagtagcaagcaagctaccttggctcgcacaactttaatattattcgtggaagtcgtgcctaatccacaaagactcgttccaatgaatgtgcaggaattccctcttccaggataaatttatatgaccaattaatcggtttcagtctcgtagtcaaccggctcatagaactatgcatgtggaatacgtttgcaatatcatcttctacatgtagtgtgtctgaaagaggaggtcatacaatacgacagggtcgacagtatcaaagccaatggggtcagtaaaatactacttcgaagtacaattttaagtgctctgaacatattacataatatgtaatattatacaagtacgacgtagtgctgtgataatgcccgtatagtttattggaagctgtggttgggctcacgatcagcatcatcaggacgtatgcctaacattgagctcaacgctagctatacgatgcatgctactacgacgaacaaggtagcacgggctgcattcttgcattctttcgacaaaaaacgtaaatttcgactttctcgggttgcatacgatcttgcccttcagcgcggctcgacacctggcgattctaacgtatatgtaaaatttgagattactgtgacacgacataaaatacgcgtcaactgtcacaaaactatgaagtacaaaacagcacatcatattggctggcgaatttcttgttgttcgttgcacgaccttgtctaccggacttcatcttgccagatattttcgtcgtagtctgtagaacccgtgtgttcatgtctaagctggaaaacctggtttacatcaaaaacaaactacggctaagccgatcaggcaagtgcccaacgaagaggcccagtttttaattaaagtttcgtttctgtgagcaagcccagaaatggaatgaatcaagtaatcgtcgattcgggtcacttaagaatttttgggtcgagaacgggttcaaaccccttcgaggcctagcataaagtggagacgcttttttaagaataataccagtaaggcgatctaatacgcatactttcataattttcttgagcaagtgtgtacgtatcatactggtcaccaagtggccaagtgtggctttcaacgtgcgtggctactccgtttgaacttctgaaagtctttcacccccagcttggcggaacggcacactgcacaagctccgcgactacgatgtgacttcaggcgcaactttattacagagctagcaggctacgatttcaacttataattctcaatcacgccccaaataacatcagggatctcgggggtccgaaaatggagatctttttttcagaccggtgtcactccacgaaaccctaatagggggtttcaaagtagcgatttttttgtctgatcttttcaaacgatgagccttcggaggctcatcgtttgtctgattttttgccgagcttattttttggtgacggccaaaagtcatccatagagcggcaccaagacgccgcttgaagccgacgcagagcagcaggccgggcgccgcgcacatactgtcataccgacaacctagcacgcacaccaacatgacgccaaagacgccgggttggcgggcagtgccttggtcagctgctagctgctgctcggttcacgagcggaggcttcaagctgttgctccggttgcgagcgttggcctccagcttggaggaccaagagcaaatccttaggccatagcaaaaccgaaaaacaaacgtcgcgatacgacgctgcgatggtcaaaagatcagacccatcctttgcaaaagatctgtccaaaaaatcgctactttgaaaccccccatttgtgagcgtttgatagctcaaaagaagcacaagacagccctctttcgattgatgtgcttgaatcgcgattcgtacttaggttcgtaagcattttttcgtttgacgcggtctcatatactgtactacgtagtataaacgcaatgattgatttaccgtgatttatcaaagtgcgtttgctatggttgaagtggcccgatggagttgtccgagccaggctcgcagcctccggtgatggcccagcattcggttgccggattcatactgagcacgttcacgacagtgaaccacacgagtgcagccatgagaatcaccaccatccacatgcccttgcgcttgctcacgcctccctgccgacggagagcctgcgtggtgtccctctggttcgggagcaagggcaggaatatgagcgacaccatcttcatgccgtagcagagcaaaatcgtgtacgtcacgtcgcggcgcgtctcgtacgtgtcggccaggatgtcgtcctgccagacgtggaagcgcgcgttgatgatcttggcggtggtgcgaccgaacggggcggccacgtggttggtggctgtcaacaagccgtacagtgcaccttcagttccctgctcgatgagctccaccacgatgtagttgctcacgataaagcggaccgcgtgcgggacttctccgatcaccggcacgccgagccacacccattggctacggatgatgtcccatgtgacgagcattgtcatcatgcagtcggtgataaccccaaagatgacggtagctgcaatggcgacgtgccagttccagtgcagtccacgctgtgccatcacggccagggtgccggcgtacgtgaaggtccctacgatagccatgatactcgagttgaacggcgtcgcgtggacccagcagagcttgatgttgctggaggacacgatgttgaagttgttgaacacgcccgagaagaacttgtacgccgcgacttggtacaccgctcgcttctggaggaccttccagaactgagagatatacgagcggaacttgggcagctctacccggttctcatacacgaggaaccaagcagcaggtcccagcggcaagcagaggcagcccatgacgaacatcagctgcgggaacgagagcgaaaagtcgaaggagccgccgtactctacgccgttgaacgcgactgccaccacaagggcacccagtgcgctaaatcccatgcggatgctgtggatccacgactgcaggtgtccacgagtgttagtcggctcgcgctgtgagtactcgatcgtgacggcgtcggcgggaacttctaccaggagatacccgaacgcagccatcatcatggggatcacatacctccccgcggcatcaggtgcgtgcgggttgatggtcttgcgctgggcctccgtccactcgtctgggcttgtcaagtgcatgcttggatctccgtagtaaggagcggcctccgggaagacggccatcaggaagagcatgcagcagcacagcagccaccctatgagcatatacggccgacgacgcaagcccgcgatcgggaagcagtcgctcaggattcccaggaacatcttgtacgaccatggcaattgcaccagtaaagtcgcagacacaacgatggttccttcggcgttcagatatccttgcaacacggggtagatgacggctgggagtaccccattgacgaagccgataccggcgtactgcatgagcagagctaacacttcaggtgacagcagacgtggaggcggtccatctctcagcgctccgtcgtcaatgtcggcacaggacttcggagaagttggcgtagtgggcacggagccgtactccaccgcaacgatccccgaatcccctcggctggataagagagcattgcgctcctcacgtacgcccattgtggcgtgggtagactcttgacaaatgaacctccgccaacggatgtggctgtcgtgtgtacgtataacgcgcagcaagtggcggcgaagacttgagctctcgacatggcaaaatcggtggccacttctgcgcctgtacggctctcagcggcgacccggacttcgggcctttgcgttgcaaaaaccgcgagcgaagtgtcgccaacagccgctctcaagccactcggacagaagcatgctggacgcgtgcagacaacccacagcagcaaggcgcagccccgacgtggcatgctggccagtggttttgcaagatgacggacgtctcttgcaactctgctcgttgcgttgcggtgacgtcaacgaggacttgtacagcaaccacccggctttgatcaacgtgcgtgggcctcgccaatcaaaatctgcttttgtcctaaagcccacaacatttgacgttttttcattacctatcttgtatcgagaagatttcaattttaatcaagagattcactttgaatcggtggtgctgcgggtttgtttggggatcttgcgctgtgcacagtagcagttgcagagaccgtggaaagtggcaacgaagggatccacagccggtgtgccgatcggcgggaaccgatcttgctgctgtcgaagccggtgcaattgtacatccgggccaaagcggtgaagctgggcttcggtctgattcagactctgaaaggctttcagaccgaagtgaaaggggaacctggagcctaaatatttcatgtgacgcggccagaaaagcagactcacagtcacagcctgtgcaacaggaagcacggctcccgctcttcgacctggctacgaagcgcttgttccttttggtgctgctccgcgcaatctctggataccctttcacgtgaattgatgttgccccaccccaccccagagcgcgaccgccgtcggagctgcgtgcatggcaggaggcagcccacctagccagtcgcgcgcggcttcaccaccgggaccacgaggtcatttggtgggctcagtattgaattgtcctgctccgagttacactcctctctccccgcctcagcgcgtgctcggaacaccaggatggcggaagtcaacaagcactccgtcagcatggaccgcctcagtgccatctccagcatccaccgcaacccggatgactcgacctacgccaaccacaacacgcccgcaaagccggtgaagcccgacatggagaacggcgcgttgcgcgagggaaagccgctgagactgctgtccgtggagtgcatcggtctgctggcccagtacggtggcgttggtttcttggccggcatcatccccggtgtcatctaccccgtgctgcagggatacctgaacgccgaaggaacgacggttgtgtcggcaaccgtgttggttcagatcccgtggtgctacaagatgttcttcggtgtcatcagcgactgcttcccgatcatgggctaccgtcgccgtccgtacatggtcatgggctggttgttttgcatcacgattctcttcatcatggcggcgatgtcgatacctgctccgtactacggcgatgctgcaatgcactacatcgatgaggaagagtggaccgaagatcaaatcgatagcatcaacgcagacgccccgaactccgctggcaaatacgtcgtccccatgatgctcgcctcgttcggttatttgatgtgcgaggtggctgcggatgctatggtcgttgagtacgcacaacgcgagcccattgagcaacgtgggcgtgtgcagactgcggtgtacgctgtcaagacctcgttcaccgccgtgggtgccgcggttattgccttcttgatgaatggagaggagtacgctggatcgttcagcttttcactgtccttccaggagctcatgctgatcacgggtgttatctgcacgccgctggtgtttgtctcgtggttcttgctgagcgaagagcgcgtgagggataagccttcgttcagcgagtacatgtcgtcattctggaccctactccagaagcgtgcgatttaccagatcgtggcgtacaagttcttctccggtgtcttcaacagcttcaacatcgtgtcgtcgagcaacatcaagctctactgggtccacgcaacgccgttcaacaacagttttatgacgattgtaggcacgatcttctacgccatcacgctggcgctcacgggcaagtacggtctcgactggaactggcggacgattattatcgtcaccatgtgcggagctctgtccgttgactccttcatgaccatgttcacggtctgggatgtggtgcgcaaccagtggttctggttgggtgtgcctatgatcgagtacctccccgatggcgtccgcttcatgatcgccacttacgtcgtagtagagctggccgagcctggccatgaaggcgcgctgtacggcctgctgactgccacgacaaatctgacgacgccgttcggtcgctcgatggcgaagctcgtgaacgcccagttccacgtgtggctgaaggatattcaggctgacaccactttggtccgtcgtgacgtgacaattacgatctggatctgctactgcatgaagctgctgtcactggcgttcctgccgctgctgcctcgccagaaggctgagacccaagagttgaagcgcacgggtgggtccagccgaactatgggcatcatcaccgtagggtaccttgcattcgccattgtgtgggcgacgatggtgaacttgctgtccatgtacacgaccacaatgtgctggaagatcacgggcggctgcgcgcccaagtcgtaagtgggctgcccaggatttagaacttgttagggattgttgctgttgtagtaccagaattatgcactcaaatggatcgttacgctgactttcacgcacatttcctcgtaactcagtcgtatgggggaaaccgcgtattatattcagtgagaacttacgaaatcaacttcaactcgatcttgagagcgagttgagcccagggtgtggagaggtgggtgcttctgctgtatacaagaactttgcaaactggacaggctcgcgaaacactaatacacacacttcgttattttttcccagcctcacaagactccctcaagtcctacgttgtcgaccagtgtctatacggagttcactggtctccaactccacgcttcctcgctcaaagtcaccgtgaatactcgcgtctactaacgttggctatatctggagaaggcgcgagagctttcgtgttgaggcaacaatggacagcagacagggagtcaatatcgacgactttaatgcggatcaagacggtgtgcagtcgtcttgactcaccagcaacgaggttggcgcagttcgcgaccttctgggaaatttacctcggtgggagaacgtgctaaacactgtccagagggaccaaaccctgctgaccgagtccgtcgcagcatttgcgaatcgagtggaggctcggcactatgagagtgacgcgcaggcagcgcgcacacaacagctactggatctgaatctgctaacgatgctgaactttatcctgagtgggacgtgctcggcaatatgccgccaggcacgcctgagtactcaagtgaagaactggagtctcgaatcgctaagagcttaaggcagaaagagacccccattttcgcaggcgaagacaacgaagatattgatgtctacgtccgcaatatgattttgtggtacggaggctttgggttgtttttacggcagccacaagtcgatgtccgggtggggcaactgatgatgaatcacacaaaagacaaagccaaggcatggctagtgcgggagtacactggagagtggcgttggagttgtgtcgtgaagaagttgaggcagcgctttcttacgaagtctcgcgaggaggacgagattggtcgtctgttcgattgcacccaaggtacacgctctctggatcagtacattgaggagttcatccgcctttcgcggacagaagaagtctctgttaagttcaagatgatcctgttcaagaagggtctccactcgcaggaactccgaaactttctgcagaccaagcaacacacaacgctagaagggcttgtgggtactgctcgctcgatgaatccacgtgaaaacaccgcggatgctggggctaagaagggctccacctctaaaagccaaggttcccaagattcgagtaaaacccgcaagccaaacccagcaacgacggagaagaagcccgattttcctcgctgcacgccgacgtactgcacggagcaaggtcacacgcgcgaaaaatgctggaaattacaccccgaacaagaaaaataacgccgcgtcgacgacttcggagccgctaaattccagtacggaccggctgctggaaatgatggcgtcactgcaggcggacatggcacagctgaaggcagatttaaactaagaggtcgcggggatggcatcccggggcctgacatagccaacccccactcacagtcccgggtgttcgacccaggcaaagcagagaatcgcgtgtactttcagaagtacagcaggctgccgaagccggttaagtatctgattaaggacactgtgtgcgtgagaggtgaccagcagcatccgtgccggacgtttttcgatgaaggagcagatttctgtggcgtatccgaagcttttgtgcgaaagcacaacctggagcaggcggtgtagtcacgtatgcaaacggcaagacggagcaagtgccgaatcgagtcgttcccctgacgatcgtggtcgataacattgagcctttcgtgttcgatttcaaattatgttacgttcctaacaagtgtgatttgatgctgggcgtaccgtggaaacgggcaatggtaccgatcatcgactgggaaacagacagaatttatagcaaagatcagtatcgcgcggaactggagcggtggaaaaagccaacgacgcgagctgtttgttctgagaaggacggagatcgcgtatcgcacgaagctgcgactccaccagagctaccgtccgagaagagtgcacattattgtgctaggtggggatttaccaagcatgtttcgctaaaagccgcccgaacgttagttcgcaagtccgacgtggagtttgtggcgttaataccccctgagactgtaaatgcactttatgtggaagttttagtggagcaaggatgttcgcggtcagtggcatcggcatctgtagcaaccgagaagcagcaccgtcaactagtgacagatctcgaaagtttcaaagataacccagggtaccctctgctaaaggagtttccaatgatattccgtgatgagttgcccatcgggcctcctgtgcatggcgagcacgagatggaggtcaagaagggtactggggcagtatatcggcagcagtggagactaagcccgagccaggaagcagctcttcgcgaatggataaaagccatgttaaaagcagggcttattcgtccgagcaagtcaccacacgcagcacccaccttttgtattaagaaggctgtgggctggagagtggtgcatgactaccgtgcgatgaatgagcgtacaatccgccagtccacgtcaatgccacgtaaggatgcaatctttgacaaaatgagtggagcgttttggatgagctgtttcgatcttctctcggggtactaccagctacgcatgagagaaaaggatattccgtacactgcctttcaaacgccggatggcctttacgagtatattgctattccgatgggactgagcaatgcgccggcgactttcaaccggattgtgcagggcattttcgcagacctaagtgacgtcgtggccacttactttgacgatatctacgttttcactaagcagcaggacgtggagtcgcatctggcagctgtaagaaaggtgtttgaacgctgtcgcgagaagaagttgtatttgaagctctcaaaatcaacattgtgtgcagcggaaattccctgtttaggagattttgttggtcgtcaaggcgtgcgcatccatcctgataaagttcgggtcatccaagagtggcctgaaccaaaaaatgtgcgcgacttgcagtcgtttctcgggactacggtgtatgtgcagagattttgcaaggcgtactcggaaatcagcgccccactgtttgaattggtgaaggcgcgaaagaagccattgctggactggaccccagcacacgcaacagcgtttgagtcgcttaaaacggctctgagcaacactcctgttctcgccctacccgatttttctaagccattctgcatcaggaccgatgcatctcgatttgcggtgggtgaggtgctattccagcacacaagtgaaggtgcggatgggcccatcgcattttgtggtagataaatgaaggaagcagaactgaattaccccacacatgagcaagagatgctggcgattgtgcattgcctgcagatatccacgcgatggagggtgcctagtggagaccgaccatcattcgttggagcgcgttcttacgcagaagagcatcaatcgccgtctgtgtcgatggtatgatctactcgctgaatttaatttgcgtttccgatacattcctgggaccaccaatacggtagcaaacgccttgagtcgacgtcctgactttgagatcgatttcttgcagcagaagcagacaggtatatgcggcaaggcgactgcagccaaagtcgctattggcaatgatccgagcagctcaagtaaaagcggggtacagcaggaccaaactacctgaaaaaccgaggggtcctggtaaagttgtgttcgtccaagaagaaaatcttgttcgatgggtttgtggagatgaatcccgtattttcattccccaggatgcagaggagctccaaaatactattttgtgggagctgcacgatattgcgagtgcgggtcatcctggagtggaaaaaacacttgcggcggtccagaatcgcttttactggaggcgaatacaccgtaaaattcgccagtatatttcaacctgtgagtcgtgtcagagaaacaagcatcgcacagggaaggcacccggcttgttgcatcctttggaaatccctacgggacggtggacgtcaataggaatggacttcgtgacaggcctgcccgaaactactagtggctacgacacgatcctagtcatcgcggatagattgacgaaacgtgcacacgttattgaaactgtggcaactatttcggctgaagacctcgcagagctttttgtgaaagaatatgttcgacatcatgggctaccgacagaaatcgtctcagatagggaccccaaatgcacctcgaaattctggtcgtcgtgtgcatccatcctcggaacgaaactaaagttggctagggcacaccacaccaccagagaactgatgggcaagtcgagcgaatcaatggcatcctgtccggctacctatgacactacgtgagtggttttcaagacgactgggatcgctacttagcactggcagaattcgcatacaacaatcggtatcaatctagcattgagatgagtccgtttgtcgccgatttggggtatgcacccaggattcctaccgatttagcgctccctgcggcctgaaaagagcctgcaaccaagttcgtggctcacttggagagtattttgcgttcgttgcaggctcaacttcgatcaagtgcagaaaagatgaaacttcattatgataaggggagatgtgaccaaaagtttgatatcggagatatggtcctgatctcaacgaaagatttcaacactaagacagttggagctgtgcagagaaagtttgcgtcaaaatggatcggcccctatgaagtgattaagatttttcatgacggagccagctacgagttgaatttgccccatgagctgcagattcatccggtgtttcatacgatggtgctgaaaaagtttgtgaaggatacttctgggtgtgttcgcgattcaaccataccgccagtgcgtctcaaagatggctcggaaggtcatctcatcgagaaaatgatcgatcatcgtgtaacccgcgacggcaccgagcagtacaagtgcaaatgggtgggcagagctgacgacataacctgggagcctacatcaaatttgctgtcggtgcctgggttaattcgagagtattatcgaaaggcgaacggattgcctactcgggtctctaagcggctgcaagagcaaaacaagcagcattacatgccgatcatccgcagatggagcaccacacgagcggagggagtcccttcttgaaggaggtcgtgttgcgaagtcggcagtctcttccggatacaggacgagtctttccggatagtggacgagcgcgcagcgccgtccgtcttcgaggcgatctatgaggcaaaagtcgccaacaggctcgcgaaacactaatacacatacttcgttattttttcccagcctcacaagactccctcaagtcctacgttgtcgaccagtgtctatacggagttcactggtctccaactccacgcttcctcgctcaaagtcaccgtgaatactcgcgtctactaacgttggctatatctggaggggtgaaagcccttgacactacctgcagcattttgtctgatgaggaactgatccggagtcggactttgtcaaattgacaagtaggtgactgatacaggaagatgaaagtgcgtactgtaggcctcgagccaatggcttgtcaagacgggggttactcaggtcgtgtagaccactgccagcagtatttttcagtctggagtgatttgtgccgccgtcggcgcagcttatatgatgacgagcacgttacccgtcaacaccacgactctccatggtgcctaaacttcgcactgccagcaatagcgtggggtgacggtggccaccaattcacggagcagcaagatgtccggaggcgaagatcggagtcgaagccagggtcaccggttgtgattgaactcgcagcattctggcggtgggttggttacccgaaaatcttgggctcattacgcaattgtcagggaatccgcgctcgtttcctttgaaccacggtgaacgccaccgtgaaggcgatgctggaggaccgatccagccgaatctccgatctcaagctcacccgaagcggcgggagcttgtactccaacatgggctcaccattcaagccggttgatacggatcctgaaaatggcgcgttgcgtgaaggagaaccactatctttgatgtcgaaggagtgcgtcgggcttttggctcagtacgctggcgtcggcttcttggcgggcatcatccctggcgtcatctaccccgtgcttcaaggctacctcaacgcagagggtaccatcgtcgtatcggcgacggaagatttttaaatgggtcttatgcagaacaggtcttagatttgatcagagcgtgctttttctttgaacttgtgattggatcacatttgccatgctttggacgacgtaagtcgtaaaagtcccagtctcactttgaaacctcagccgagcgcctaccacgacccaagcttcctaacctctgtctgcgcctcggtgatgcccgagccacatcgccacggaccgagccgttgcagcaccccgggtcgctgcccctgcaacaccgcaacggcatgcgtcggaggaagatgagcaagatcctcgccatgaagagctccagggtaagcgagcgcaagcaccaccagcagagcagcaaggaggccatgggagaggccgagaagatgcagcagcaccatcgtagtgggcagcaggtgggcaagatgcgtcaggagagcacaagcagcagtcagccaggaagtggcttatggaatcgatgggtcaagtcggcctcgcgcgacgtgcagcgcgccatactgcgctgtgcaagctatactatttggtgggcgaggacgcgaaaagtgatgtggtgcagctgaagatgccgtccgtcgcggtaagaacaggtgacgcacagacctgtgcgtgcactcgtgcagacggaggcatgcctcgtgagtgcggagcgcgtcaagtccacgcaggtatccggatacatcgttgctgccctgttgtccaagtcggcgtagctgaccgctgcgccgtgcgccgcttctgccacgtactcaggctgccgccgccgttgggctccgagtcgagcggaaacgcgcgcacctttggctgtcaccgtgagcgagcttggctcccgctggcagatgtctacgacacctccatggtgcgcgtcaggcggtgcctgaggtccacgcatgaggatgcggagcccgacgaggtgggcgcacagtggaagaggctgcgtcggacgtcacgaagacgcgtcagtcctgtcgccggcgccgccgctgctgctgctactccgtctgctggtaagggtggtcgcagtgcaacgtcttcgctttggagagtttgttgccgtgctgtggctgtggcacctcgctacgagctgaaacgctatataattttcctagtcaagcaggagtgaaacatgtcgatcacatgccgtagctaggctacataattctaaagtacgtgtgcctgttacttgttggtaaactaattttacaatatatgtgttaattgccaacagtggagtgtcgatgctgagagtgtgaacggaaaccaaaccaggtgtgcactgctttgactaaaaaaacaccagtcgcgaatgggatacaatgcacgcactgcagcaactgcattttgactttgagcaccactagaaacatgaacagcgtgtactattgcagataatgaatcttgctgtcaagagaagtaggaaagggaggcatgttcgactgctgcggcgactcgttctacctatccgatacagtgtagtaggtgatagtccatgtaagcagtgaatacaatgcttttgaacacgatctactgccaaaatacctattgagccaaggtaaccggccaaaatgcacaccctttcacgtagatacagcaccacgaagtgttgctagagtaggaagccgaacggagcatgcgctaaggaacccagtcatgccatgatccaaagctgtggctgtttggttcaggtcttttgattcggtctcacaatcagcatgttcaaatcctggacctgatctgcataagaaccaatataaaggcaaccatcggcgaccgtgctggtccagatcccgtggtgctacaagatgttcttcggtgtcatcagtgactgcttcccgatcatgggctaccgccgtcgtccgtacatggtcatcggctgtcgtgattctcttcatcatggcggccatgtctgtccccgatccgtactacggcgatgcgtccatgcacaacatcgacgaagaagaatggactccggagcagattgccagcatcaacgaaatcgcgtcgagctccgctggaaagtatgtggtgcccatgatgcttgcgtccttcggttatctcctatatgaggtggcagctgacgctatggtggttgagtacgcacaacgcgagcccatcgagcagcgcggccgtgtccagactgctgtgtacgccgtcaagacctcgttcaccgccctcggcgccgctgtcatcgggaatacgctggcaccttcgacttctcgctcaccttccagcagctcatgctgatctcgggtatcatctgcgcgccgctggtgttcgtgttgtggttcttactccacgaagaccgcgttcgggcagtacatgtcgacgttctggatgctccagaagcgcgcgatttagcagattgtggcgtacaagttcttcgccggtgtcttcaacagtcgtgtcgtcgagcaacattaagctctactgggtccacgcaacgccgttcaacaacagcgtaatgacgatcgttggcacaattttctacgctacgacacgggcagcgttgcgtaaattaaaattgcaataaaactattgataaaattgtggtcaacaactacaattagaaaattggatgcaattattttattgtaggataaggaagctttctcccaacttggcattccttgcgcttctctgtcattgcatctatccaatcaggacaagttcttcaatgaatttagccaatcacgatcgattcgtgtgtatcccaacatttacccaattattttgggaatttacagtcttgctagaataatgtccaatacaaaaattaaagtaaatgttgcattactcatatttgaccgcaaattcccaatacaaatcatgattgtatcgttggtggctgtgcctcgtctgctttctctcctctcccatttgaaaagatgcagcgggcgccgaaagggcttgagatcccggaagggacagcagggcaggaggcagcggcgatgaagtgcttcagcgaattcttagctcttgctaacatgaatgaggagtcaactgcaagtattgcgaagtcgctgtctattcctgatgctctatcgagtcaaaacttttactctttgctaactgccttctccattttcttgcaaactaagccaagtgctcgaggaggccgtcttgctaaggctactgctgtgggctatatgtcccaagttgtgaacctgatccgagagcggtaccctctgtacttgtcagacagcaagcgaattgcgaaaataggcgacaaaatgggttcaactattgaggagagaaatttgctagccggcgtgcagactggtgaagctccaggctgcacgctcagcgacttgcgtgttctggtgcaggaaactgcgattaagggggttggctcaggttataagagtttgcatgacgctgctgtactaacgttaatgtggcacacgtttggtcgagtgatcgatacctgttttgctaggaagagccagctatctatggcggcgtcgggggagctctttctgcatctagctcgaatcaagacttcggtggttcaaggcatctcgaattacaaggccgcgactcactgggagcagtgtatgctgcatggcctcggaatgctgttcgtcggagcgtcggagccttccagctatgtgttcccactagtgccgcacgcggcggcatcgggtttgccaggagagaagacctactgccaagacgaagctatactctagtgggagaaccttgaagagaaagctgaaccaaggaacgagccaccaacaaagcgcgtgagaccaacgtgtctaagtatattaatggcgtcattaccatggtctacgagcgtcaagcccaagcatctgccccgctgtccccgacgctcaccgcagggctgagcagccactccttgcgccgcggctccgcagcgtatgcgaacgcctcaccgcagcttgcgatccagtggatctcgacctggggagattggctgctggactcgctcacgaaggcgttcgcgtacgtgggtaccacgacacgcgaggaccagagtgtcggcaaagtcctcgctggataccgagacccgcacctgccatgcgtcacgcccacgattgacaccttgatcgagcttcttcctgtgcttcgagtacgcccagctgctaaccctgcgcggccagctcttcaagaacgtcagcggcttcacggacaccacgctcaacgtcgacgccttagtcctggatgcggcgctcgcgtccctgctcatccatcttgacgacgtcgcgacggcagtccagcaggagcaggctgccacaggcttcacgcagcattacctgtaccgcttccacgaagctctggaagcaaacaacgtagcactgggagctcggctctcgctggacacgtgcatggttggggtcggcagcttcgcacggcttggcaaacggagaacttcgggcagctgggtgaacgcagcaatggaaacaccaccatacttgccgcagctgtcacccagatgctatcgtccatcgcagcaatgcagcgcacacttcagaagctcgtcgcggtccacgagagcaagtccgccaacgctgacggtcctgctccttgtcgatgtgctggccaggccccgcaggcgagcactgacaccgtcgttgaagcgcactctcttgctggctgcttctacaactggtacacactggagctgtggcacacggcaactcaaaagaaacaaccgttggttcgcgctgacctcaaggcaggcgtcaacatcatgatcatagctgcaggacgagaggtagacgtaccaacggcgccactggaccgggacggcgtcacgtatcagctgtggaagcagcgtgtctggacgctagcggaagacttggacaagaaggtcaacgctgcggttgggagtatcgacggtaaacgccgatccaaaaccgcggggtcgctacggaagcgctgtagaaagctgcgcgttgaccaccgctctgcgtacgacgcgctctgctcagcatttatcacccgcaaagcgaacggtggtatcgtcgaccgctgcacactagctagtcaccaatggaagcacaaagatttggagtcgtaggatcacctagcttgtattaacgcttaatacattcctattcatacaacatggataatcgaattcaaggcgcaaatgcacacgtcatcgccatcccacaacttaagcacagcgcatggattcccgtcagtcccgatacaagtcatacacaatagaaaaacgctcacataccgtcagcgagcgcgcacgacctcgtgcttggccgacagctaccaagaccggcagcacaacacccgccctgccgggttttgtagctgctttcgacgggtccttgcgtggggcgcgtggggcgcgcctgggggcactcggatctggggtggccggcgggggcggcgttcggcacgctcggagcgcgctgttgtgttggagatgcggggcggaatatgcgaaggcggagaaggctgcgcagccggccaaaaataaaaccataaggatttttcttggctttggagccgataaaccagtccatactttgttgaagtcatttggaatctcgcttatgattggctctcgtcattgggagcggcatttgggacctggtcgattactgtattgtacaagacatttgacttgataagtgtatgtgcggggtagccaatcaaatggtccgtacagacctctatacaaatcacaagaatacaattcaatgcctacattgtacagttaaaattatagcgtgacggcaaatctcaatcaatttctcaatgtaaattgacgcaacgctgctcacgggcaaatacggcctcgactggaactattatactatattttattcttctgtgtcgcttgaacgcttatatcactctcttaacgtggcgataccatccgacaaagcttcatggggtctggtccttttctttcagtttgggcagtcggagactgcttttaaacgaaacgttttgcaagtgatccaaaacgtatcggtgtagcaaaccaacactacgaatgctgaactgctccagtcatgaatttatctgcctagtttacggtgcgctttgtttgctcaagacaaagcacaccttttccattaagatttcagcagtcgtctttatagacgagcagtgcctcccagtgtgtgtgttagattgattcatcaccaagacagtccacggagccgcagctagcctgggcggtaacccaccgaaatttacagtggtcgacagcgtcaatgacgctttttgatgtaccggcatcaaatttagctcgatcgtactggcattttaccacatgcgggaatgccagttggcatgctacgctgatcaatcccatgattcatatctcaaaacccttgaagctacatatttcttttgctttagttacaaccctgcagacctttcagccagtaatacaagcgtatttcaaccgtggtatttaatatcccgttatatgtcactccgattaatatatcggtttcgagaaaggccagattatccgctcgcaaatcggagcagccaaaaataacatagacggctccgaaggcaacatttcgatttcatcgcactgatggcatcggcccctagaaaaccgaagaaggcaaggcgtgacgctgaagatgctgcccgagatgtagcgttcatcaaggcccatcgcagccaggctctgacactagaggagagattggatgttctcgcacttcaggcaaatttacgtatgcataatgcaattattcctcgtaatgtctgccatcaacaaagcggctcgtttactttgttgctccaacaaggcatccggtgacatctggtcgagttttctatcgcatggcactgtactgaccgctgctgctgtgggagctgtatgtcacgattacccgattcgaaaccaatgaaagatgaagttcgtgcctttatccgcagccgttgtgagacgagaacaaggacaactgcaaaggacgccatgcatgcctatcgcctcacggtactcgaagcctgtgtccgactcttcgttgtcacccagaggcataagtcgcacattggtttccataggattgccgactgcatgggcgttatcatacccaaatgtctccagcacttcacgtgcgtacttgccctggcgcagtgtcacggtgtcgggggtctgctcgacctcgatgcccagatattcactcagtaggtcctggtctttcaatgcgtaggccttgtcgatctcctccaataacttacacttgctctcttcgcagttggttgcgaccgtgatgccgtccacatacacgagaaccaacatgatcacctcaccttcaaagcggtagtagaggcagggctcagtcagcgatcgctgatagccatggttcagaaaccagcggttcagctccgagttccacactcggcccgattgacgtaaaccaaggtgtattttacggagtagcggacggctaagttcgttgctgacttacggattgctgaggatgttgtgtatcgtgacaggcacgaagtgtctgtgaaggatgtagacctggcgtcactgcatttcaagcgctctgaaattgaaaatgaacctgattgcaacatggattccggtgaggaaaaaaacactgagcttgcgcagcggggaactgctgttggggctctgacaagatggagtctgcgggtttgcaacccactgaactcgagggggtcgaggatgctagtgagcgttttgctacctatgagcagctcccgagtggctccttcgaggataattcagctgcgtgcagggaggcgacgcaggcagagcggggctgtgcaagctctacaggagtcgaaggcattaccgcagctatcctgagcgaagttgcgattgcggtggctgacgacatggattttgcaggtgctgtccgcggctatggagcgcatgtccgttcctggcaacacactgacaacgcatcatcactgccctcacggggtactgtgcagctttcgggtgctggtggctcttgctgcggcgcagcatctacagttgtacggtacaccgcatacctcaatgcacagctcacgatccgtcagtacctgaagtcgatcgaaggcttttcgttgtgtaccaatggacacgtttacgtggttctcgacatcttcagcatagccaagaacaaaacctagcttcgcgttgtcgtggtgcttgcggcgtccaggtgaaacaggtacatacacttaagctagcgcgccaaacttgcgaatgtggtgacgatcaggcttagcaccgaacatcatctcagacggtatcccttgtgtatccgtgttgtacaccctgttgttcacatacacagcgttgcgtattgcctcaggccacaagcttttcgggaaaccagcgtgatgcatggacgccttcgtcatctcgacaatcgactgatgcgtcctctcgcacagattaagctgcgagctcttgggaccgacgcgaatgggctcaatcctatgtgagccataccaggcgtccatcgcatcagtgacgaactcgcctccattgtcagtccacacctgctgggccgggtacttgagccggtttgcaccacgtttgtttctcctagcctgccgctcagaccataaaatgtactatttgatgcgtgccctcactcgccttgcttgtcaggaagtgcatggttacgaaacgagaaaccccatccatgataatcaacactgcctcgtagcgagttccattatccttgctagggatcaacaaatcaacgtacaccacttggtttggctgctccaagcctaggtccagcttcttgcgatataccttctttttctgcttaccgacgtaacacgcgtcacatggaccctgctgctggcgctgagtcagcaacatgcccttcacgagtcttcgggcgaccatagtcttcaagtactgcgggtacgtgtggcccagtagctcacgccagagctccaaagccgcgacccacttaacatctgtcacgttacacagggctggtcctgtggaccaacaaaagctccagtagacggacgcgaaacaaagaagcccatatagcttcttggggtgtggcaacaatcctggtgcgtccttcatctatcacacgaaagttcatcgtctcacggtcataatcaaactgaaggtcttgttttgctgcaagcccaggcaacaaaagcccatgctcagctccaggtacgcagaaaacatcatccaagacgactgctacttgcaagccatcaacttcggtcactaacgctaccgtttcgacacctgcgatgcgcgatgcgagagccgggatgccaccgtgaatacgttccgactggctcgtgtactccgtaaatgtcacataataggcccggttcccagggacatggacataagccgctgtatcgaaataccaccaaccatcgctggtatcaatcgcaacttcattttcatcatcggtcctatttacctcttgaacttcatcatcacttgcaacttcacagttctcatcattgacctctgcctcaacaccggcaccgatcacaatcgcatccaccacaccagtcaccactccgagatttgcaccctcatggtctggctgtgatggctcactctcgtctttgcggatgttcacatttccgccacttctgcttctgctcggtcacattagctccgccaccgctaggtaccttcgcacgatcagggcagtcagcttcgagatgtagcacttccggagcttcttcttttccttagcgtccttggcgccatcctgctgttgaccatcacttttgctgtccttgtccctggctccgccgaaattgcctccgtgcttctgacttccgcgttgcaccattctggtgcagcgtttcccgcggcatcgacgtccccaccatgtgcatgatctgcgtctgcttctcatcgaacgcctccttcttctcggccgtcgagagccccgatttgacaatcgaaccctccatgatcttgatgagcttcttctcatgaaagacggttctcatcgcccacttgtaggtctgccagtctcgtccatcccattgttcttgtgaatcccctccaccgtgtacttgagaggcttcgtcaccttggatcacttcttctgcagcaggatcttcacggtacttggttctagtaccctattggaagtcgcactcgatcggtatgaccagcggccaacactcgggggagaaagatgaaagagaaaagtaaattgactgttagtgctgcaccccccgtcaactacttaagcgggattcagcagcttctcatacagagaccctacatacttagtttcactatgcttcacagccctgctgctgctgatccaggctcgcagggtccccaggccttcgtcttcaacttccctgccgttgaagacggcctgcaacacgcattccaacagaaagaacatgaaacgctgaagccgtactatgtaggtacatcgcgttatggcttgagttaacaacgaagtgataagttcaaagttcgaacaaaccgcgaaggtcatcacgattcatgagcacatgttgtttgaccactatagcgtagcgcgcgcacctatcgcagtggcacccgtggcgaccagccttcgggcctacggctactcctgctgacgatacttcacccctccactcgttcatttggcatgcggctcgggactgctgctaccgctgtcattggttcagccatgagggccagccgctccaagtcgacgtctgccgacgtcgacttggccgagacggtggagacggcgtcgtccaaggaagcgagcacgacggtcaacaaaaacgttaacccgtttgcggctacactgtatggtaccgccgaacaagcggtacgacgctccccaacagctaccgagagacggagacaatttgatgtagagcaaaaatgtggtcgatgcttaccgaaaatgcttaagtagccttgacccccttaatcctgtgacactgtacgttgaattgcgctggttttgatgtgtatataaacatagcatgcaggatcgtggaccgcgcttgagggcctccggaaagtagttgtttttaacctggaggccgtcaaagaatctctgtgctgcgcatagctagataggtatattttggtcaataggagtctccggttatattcggctaccgccgcttacgctttcccggaagcagtcaatctgtcataacgggactacatcaatcccggaaatcataagccaatccgcctacgttttggcgggaaaaaccataacttacgtaaatacgagaatgaagttttggttttagactggtgtaactccccgagctatcaagattttgacgcgctcaatagctttttaaataaatggggaattcggtttaaggtccataattcaaaactattcggtttgggttccgtaaaattactaattggttagcttcattctgaagtctgcggaggtacacacacttgcgttaatgcatgtgcttcgttcagaaagtttttggtgacccagaaacgatattcaaattggacccagtgactgtttccctaaaacgaacaaatgaaagtttatctttgcgctttccagacccagagccgtgtcagcaactgcgcacccaagcagagatcgtagcgcataacgccttactggcctctaaaacacctataatcttcattataacgcttatttgttttaccaatcgggtatttttcggacccaaaaccgaattagttttgaacatagtcgcgcgttgcacgaaaaaactctgaaattaagtacagacataaatgtagtgtttaaagcccagtggacgcctaccaaaaacggatataactcgacatagaatgaatctctaaatttgtctctaaatatcaaattgcagaggtcgaaatatgttagaggtcgcctgatatatgcgtcagttgctagaaaaagaacatcaataatgaaatcaagtcaaatctaatatgttgccatgcagcgacccttcgtttactcagacgtaaaaatcgtctgagtaaatataagttttctaaaatttgaatatgttgggtgattcgttagtttttggtaggcgtccagttgctcactacagagcatctcctgcgtccgcatggcggccgcagcatctgctaagttggctcgaaacttatggaagttaaggcttgtcgcaactctaacacatttacggtaaatgtgtaacttacgccccggaaaatgatttaccgtagaactgtaaagtgaaatgacagtgtactctagaatctgatgtcagtccagaatggttggtaatcacagatattggcgttgttttagaccgtatactaacttctagtgagcagtatttaagccttgctgctccattaacatttctgcttttacaagcttctcgacctggttcttctcatttctaccgtatttcctacgttgaagctcctacggcttcgtctattggtacatacatggggtgacgtgttcctctgtcctaattcctctgtaaagtccattattccaacagaacttagcaaacagtctgcagcttctaatttttgctgtcaacattttgttgaaaggttgagggtctattgttaccattttttcattttaaggagttcttatcagctaatgcgtagttgcttttctactgattggggtcgtccccgggcgtagtgctccgccactcaacaacctttgcacgtactcagagcggtatagtgggggtgacaaaggggcagatctctgtcgacgagcttggcgagcggcgcagcacaagcagtaggtgatcaccgtggacgtttctccgggcaggaagacattgacagcagcttaaataaatcgaaattacttatttcgatttttgcgcgtaagtaccatttgacgcggtctcagcctgagactatcaggtacttaagtacatctcatgtaccgtgccggcgttgcgtcttggcgatcgattcatggccgctgggcatccaacacgttccagcagtacacaagactaccgatatgccgagaattcgtcgagatcctacctagtatcctaggtaaccgatatcgtggccgggcagaagctcatgtaagtattgaagtttaatctgtcaattctctctctatgaaggttgtatgcattggagccaaaggaactgctgcgttcacggtgccgaagatattatcaagtcgtggattataaccttattaaactcgaactttctacctaagaagctaaagattgtccatcatggattacctccggaaacgtgccagagttcgcccatttcacgacttgggcgcgcagtcgccggtgatctttcagcacattgtgctctcgtacatggacaacaagttcaccatggttgcccagtccatagcgaatgcaaggtaccctactgtgatcatagccatgattcggctagaccctcccgtgcgcttcagctcttgcgtctcagccttttgacggggcagtagcggcaggaacgccagtgagagcaacttcatgccgtagcagatccagattgtgatggtcacgtcgcggcgaatggcatacgtgtcagcctggatgtccttgagccacacgtggaactgggcgtttacaatcttagccaatcaacagccaaaaaaaaacggagtggtcaagttcgtcgtggtagtcattaggccgtacagggcgccttcgaggccaggttccgccagctccaccacgacataagtggcgaccatgaaccggataccgtccgggaggtactcaacggcagggacgcccagccagaacaactggttgcgaacaacgtcccaaactgtgggcatacggcgttggaatacctgtggggtgtacctggtatttcaatccatctcggagtggaaggcctgtggtttggcactggaattggggatgttttagcggtcagtacgttgacggtactaatgttgcgctgctggagttgggaaaaactagcgaaggatgcgaataaacgggtgaatttgtaagagctggacagcatccatgtgcgcttctatagaagttctagcagttagataagctctgtagactcattaccttcgtttcgtttcgtttcgtttcgcattgaggtacattgatgtcacttaacttctttggctaacgacagctacgaccttgtcggcggttgtctctatcctaccaccctaggaaactgctctagccgtaaaccagagccacctgcacacactaatgcgtaaaggccgcgaaccccgaggagttctcatcgctggtttgctccatccagtgaccagaggcggagccagccttaaaaaaatgggggggggcatagatttttttaaagtaaaatccacaatctacatttcgattcttctttttgtcatcgctttaaacttttcgaggaccgagtctttgtcgatgctatttgtaagatcacgctcgatagccaaaaccatcaggtttgacatccaaagatctcccattgttgttttgagccgcgtcttaattcttttcatggtccgtagtagcagttgttacaggcagcacacacaccaagttaataattcggtgcaaggtcgggaacagctcgttgttatcggtcccgacgagttggatgcatagttgttgcgttgtcttcaatttttggaaccttttgtcgatctttgccagattgcgaaaccgagtggcctcttctcgaaggtcgtccagctcatcggtgaaatcatcggaataaaatgttttagccagctcaacaattttagtagcgctccaattcttgaaattatcacgtggactgagcgatccgcacaattccatgagactaagaacttctccactaaatcgtgaatccatttcagaaatcaggtcacgaaggatacagttgtatacttcgtcacgatagtgagcttcttttgtaggctggacaccatccctggaggagtccgctcctggaattccagccctgccacacacccgacttctcattacgcgtcgtttccacacgccatttttgtcaggaatgagaagggtgtcgtcaacttgtattgatttgcaaaagttgaccgatgagttccaaatcgattcaaaacttggcgagttcccagtcatagaactatcatcgagcatttcttttagttctttggatacctgcttcgtcatattcacagctggcacgatatcgacgtcatctttctgcaaaaattgggacagccaatttgtttttcctaaaactgcagtgagaatctccatatgaaatacgaagtcgaaagtccacatcttctctaaaattcctgacgcctcagcgcgtttgtgggggttcacaccatcgaccactacacgctctaacacacttgtaattggggcccaaagcatcttgatttttcttaacgcgcgaatgtgttgcaattccaccttgttttgctaagaccctcggtagaagttggttgatttaaacctctaccagattctagatgtccttgatcaagcattttttccaattccacagcggcttcgtcaagaagttgatctatccttttacacgaagcacttacagtagtgtgaatcccttgcacggtgtcgaagcattgcaccaccgagaccgtgttcatagtcactgcaactaggacgagattaagtcgatgcgcgaaacagtgaacgtagtaggcgcaaggacactgggagcgtagacgtcgctgaagaccagtaatatcacccgacatgttggacgcaccatcatatccctggcctctacagctcgccaaaagcaatccccacttctctaattgcgttatcaaaccatcgtacagtgtctccgcattcgtatcgcgaacatggacagttccaaaaaatctttctctaatagtccccgttgcagcgcacacaaaacgaattacgatagccatgtgctctttcttcgccatgcagcttgcttcatccaccagaacagaaaaatatccatctgcaatctcgacctccataatatgctttcgaacaacatcagccgcacatttgatcagttcacgttgaatttgtggcgatgtgtacacagcgttttccccagctaaggacattgcgcgagaaaacgatggcgcgtgctgtgccatgaactgaacaatctcaagaaaattgtctttattttgtgacgtatcgtgtgcattgtaaaaaaacgttagtccagtgatgtcatttcttacataaaaattaaaccgctcgtacaccttttcgtcgctgccccgaaatgcaatttcctgttttgcaaggagaaggcagatctccagaaaaaaagtcaggcgctcccggttttgttgtcgttcaccaatcttttgagaattcagagccacaccaacgtcattatgacaggatctccgattgtcgaaatcgatcagagctgagtggtgcttcgagctggtttttatcccaacatgttttgcaaatccgtcttttgtagtggcctttttccagttcctatagcccgttgtaggttgtgcatacactgtgagctcgctttgctgcgtcattacttctcggctgaggtagcagcataagcaatacaccgcgtccgtcgaaggagagtattcgagccatttttttttttcaaaccactgggcccgaaaagcacgcatgcatccaccgatgtcacgggccggatattgcttgagttgcggttggtaaggaccgaggcgaacgtaggattgtataacgtcacgcagtagctgatgatcggcaatcagttgcttaacgaaaaataaatttggtggtctgtgagcaggatcccgcctaacaaagtctccagtggaacattcttcagctctatcaggaattttgttgagcgaacaccattccaacgctgcttgctcttgtttttcgcgcagcgttacaggttggggtcgtggcccaggatctgattcaatactgcgggccatgtcaaagtcttctggctcttgacggggcttcttcacaaagaaggtcgtgattgccggctggttcctctttccttccgtgttattatcaattaagcggaggaacagtgtgaacttcatgcatgtgccgtctaaataaaaataatctaaaaaaatcgaaacgccttcgccgaaaaatggggggggggcatgccccccccattttggccctggctccgcccctggcagtgactaacatcgccggaagcgtagttgtactcgtcgtcccaagtcgagtcggagccacatactcggttgggttttctttgaaagctgcggcgtgagtccatcgccatgtttgcgagggcatctgccatgctgttgcgcgcacaagggtggtgctgccaggagttgaccgccaatttgtcggccatcctgcggctttgccgatacagcggtcgtaaatgcttggcgcgtggcggtgtccgcgtcttctgctgatgaatgatgaggttactgtctcctaccacatgaagtggggtccagccaaaacgaaggcacgcattgagtcccgtcagtagccccatgttctccgccaggttattggtcgcgctggcggtcgcgtaggacatgctaacgacccaacagatttcatggccaccccgtccgtttccgatgcagaccacggcagcaccacagccgccagggcctggattaccacgcgagccgccatcgaaaaacaaaaaagatagcggcgccgtcctagagggaccgcttcgatcgtcggctcccacggtgatatgagcacacgacgcatcgtccgtgccgccatctcgagaacgtcacgatgaatacctcggccgagatgtagatgaacggtgtcatacccgtgacgcagtcttgacgccaacagggcccgatgatagtccttaaatataaaggcattcaaaagattggtataatcagcaagcgcttccacagtaatcactctgcttctgctgacacgcagttttaaggcacttggccatagacctgtactttgcatcatttcctatttgtaaaagcccattggacttttactggtaatgattaccaactgatgagtcactcattgccttacatgcaccaggatgtgagctccgtcgcaccaaccatggagcgattgcgaagtccgttgttgacgaatgcttaacgttgcttcctatcccagtttaactaggttttactaaacgttaaactggttctcgtaatatttgtacctgtagggaattttgtgctgtgagtgcatgttactttttggctattcactaaatggctattcactaaaagacggctactgataacgccacaaatcttcggtacacgtatccgtttgggggttatttacttgttaacgttaattcgggtacccggactggtggtccgggggatttgcagttctcaggagcgacaggatgcctacatgtagttccgacaacacagacgcaccaaaataaatcgtacgtgcggattttaattattaatggcgactacgtacattaattaaaaaagtaaaatcgcaactgcgctgatatacgaatttttttggaatatttgcttactatatttgagctggaatgcatactttactaatttcagtgaaaatatccgcgaccatctcctgcggctgcgaagcagcgaagcagccgcagcatctgcctgtattgcgccttaacattaaagtaagggttaatcgcagtaaagagctatttatgcatattaacaatatttccctgaaaagatctgcagcttaaatcttgcgtctgtgccgtcgcagctcgtccacgttggaagcaataagtcttcaactcatcagcaacaataagcctcgttgtcacggattcatcggcgcttcaattgtattcaatccgtagtttgcttttccgaaacgcttgtgaattctgtgatgaccgaggagtcgttaattgccatataaatcaggacgaagagttccatagtacgcctaccagggcctcaatgacacgagacacgaaatgagctcgtccgataatgcagttaccggtagaagatttcgccgcttttatcacaactagaacaaaccaaaccaaaccaaaccagggcctgttcaaaccaaaccaaaatgaccgtcgaaccaggtttgaatcggtttcatggtttgaacccgttttattttgtaactccaaaccaaccctggcagttttcacgaccggttggaacccaaggctactcgctctctggtgacagggatcactgcggattttacacaagacgaagttcctcgtgttcgctcactagtaatgtttcaacctacaacagcgatcgccgtgcatgaagaggagagccaggtcaacccattgcgggaggcagtcgtagctgtttgcggtccagaagatttcgaggatcaagcgccgcaaggccggcctaattgctgtagccaccgccatctcacgagtagtgtacaacgacgccagctttttgttcaagaacaagtcacgctcagcaatgcagtggtcgtcgcagagcttggtagagttttgcaggactcgcaagttcgaaatgatgaaaagctactcgagattgctcaatatactcactaccatgtcattaaaaccgctgcgggcacggaaaatcgtttgggttgccgcattcgtgactatcttgatgccattggtgcccatcatgaagcctctgtgaaggagcaaattgaacgccaagcactggaggttgataagcgtttcaactccattgtacaagacgatcatgagcgtgttcgcgcctctgctgctgatgctgttcgttctctagctaacgacctagaggaccagatcaatagcaggttatcgagcatggatacgacaatcaacgcgcgtgctactacgcatgcggtcgcgtgtgaggagcgacttcaaacagcactgaaacaagttcaagatgacttcgaagctgccgcagatctacagtcagactggatcgagaagcgactcaatgctaagcttgatgcagcaaggaaagcagctgaagctgaacaagaaaccaacttgcgagcttgtgagattctttatgaagaaaacgcgacagaaatcgacaagaaagatgctgaattagcgcagcttcatgctggtacgattgagcagaggcttcaaaagaagttggatgacgctctgcaatcgttccggcgtcagggacaacagcgcattgacacccgagtcgtggagagtatggtacagttagaacaagcccaacaagccgctcaaggtcgactcgctgcgacgatgatcgcgaatgtgtcgtctgtagtagaaaaaatgcaacggcagctccgggaatcgcaggcaaagattgatcggctcggtcaagaacttcggaaggtcatgcaagctgctgcagaaattaagtccgcttaagtgaccgtatttcgaaattggagtctagatcaaagttgctgagaggtgtaactacgcgccgagatgctgccgccattttgcaagctccccccccccccccgtggatcttagtcgtcaaaataatggagtcatttattcggcgaaaagggagtcagcaacttccgctatggagaaaccgatacgcaatagagtgcattttgtaccttcaagcgaacgacaagcatctgaagacaaccaagccgatctgttgacagaagcaacacctggcgaacgtagtgcggttttggcagcgctggctcagctcaatagcggtattgcccagctgctagcaaatgccgaaccggcaagtgtggtcaagaacccagccatcttgaaacccgcttcatttcataacaaaacaactttttcacgtcgtcaccgccaacgcatgagtgagtcaaaagagcgtggctgcaacacaaatcaagacaaggaagcaggaacccgagacgttgtggctccggctcaagcacgggtcgcagcaacaaagcaagtagagcaacacgtgttgcagcgagaacgggagttgcgacgtacagctatgcgctctgtgcctcgaagcagcaaatgatccatgaagaaccttgcttttttgctaaccatagtgcatcaacaagatataatttgaattactgtggtattccgctcccacatgcatataaatgctcgagtattgcggcaaagtgctcatgcaacctggtgattctaaaatgaccctttgctatcgacttaagcgtagacgccagcaatttacaggaatgcaatgtatttgagtggctgttaccctgcatgtttaaccgctatcgaatacgcacgacgccatctcactctcccattccgcagagaatggtgcgtcaatcgcttgcgaattgagagccgcgaggacatttgctgggatcgattccttcacctcgcagtctcttgcaagtggcaacatcgacgaacctgcggttcctgttgagaaacgagcacatgtcgatgttgtgcttcgcgatgcttgtatgatgacttgtaaccagcattcctgtgattccaaaatctcgttaaatctgtgcggaggaacacgggatcgcaaataaaacccgtgcggcaataggcaaaatgcgatagttgttctcaagatgctgccgcttccagtacgcgagagctgactcaggtttcgactccacgacctgaagcctgcttggatggtaagccatctgtcaagttcttcatcgactcgagcttcatggaaatcacgctggactactgtcaccacctcttcctcagtaaacgccagaagttcttccgaaaaaactgtgtgctgctgcagatttggtggctccagcatcgacgcaacgggtgctgtgacggggtcgtgggctgagtagtagcagaagctttcgaaattttaatcatcagtgctctcagacgctacatcacggcttccttcacggatgcaacattgcgcgccacgttttgcttgtctaagcggtgataggggtgcttcgggtcgaaaactagctgctcattgcacagcttgacgatcgtcgctagatttatgtcttgattcttggatgaaggatgcaacagcatctgaactctggtatataagccgtctgacggaagcgcgctgggtccgtgtaccgcacgaaaaagttcttgtgaaacgctgttgcgagcagagcacgtgtagtcttcgtgagattaaccaggcaccgcacttgatagtacagtggaggctcggtaggcaatcgcactctgtctcggatgggctgtgtctcgtccaagacggtctgccgaagtcgataaagagacaaaagcacatcaacttggtttgcgtcttccttttggtttttggtgttgagagcggcaattgggttgagtaacccatagagttgaataagggtttccttgtcgtctgcaatcggtaggccctcgggtatatcgtctcggtcacgaatggctttgtcggtacgctcctgaaaccagtcttcaagttgatcccattttgctagaagacgcttgataaccttctccaacccccataaatcggtgctctttgtgttcaatcagctgggtagagcccccatcgttcgccattttacaaagctcagcaaagaggctccccatagttgtattggaccggattgcaaacgtagtgcgcttgatgcgagccagtagatcggtaccctcgggattcttggactttgggcgttgcgaaacaatgccgaatgccattttcgtcgctgcgtttgtaagatgcggcatgcaccattcccattggagaccaagtcctgtcttcatcatccacttgacgtccggaccagcgtcgctcgttgacgcctagagatccttgttcgctagaccgaagtccttcagcagctcgagggcccatcgcttgaacggctcgcgattcccctcgcttctctcgccgtacatgggttcataatgacgagtacctagcaggatcgactggaacttccactcatggtcgataaagtagagacgaaggccaacgtatttggtcgacttctgcgtcttcgacgccaggaaatcacacaccactgagtacaccggcacaccgacaagtctggagcgatcaatgtacgagcaggccgcgcttctggcacttgaatacagctcggctattgcccggaacaccgtctgatggttaagtgtgactcgatattttttgcagagagtcaaatcagcaagcagtttagattcttcatattccccgattcgaaaagggaggttgttgttcaccactcgcatggtttccagaaggaaagtcattcggcgactgtcgtctccattagaaatcgcacttcggaagcgctcaagttgctcagcacggtcccgcttcctcttgctctctgctatcactttggccgcagataccaaatgcccttcgctgagaagctttgtagccttggtcgtattaccaaaaagctggataaacttgttctggcggtgacattcatggctgccttggcaaatccaaccaaggtactccttatcatccagtgctgcagtaacacgaacaccccaattcagtatactggagcactctccccgccgttttgatacgactgtgaagccattgggatgtacgtagtctcgaatagcttgggttgcatgtgctgggactggaatcgttgcgcccgaagtagacgacgtagtggcggcagctacaccaggcaccggcgcaccagtagtcggcatcgtgacggcaactacagcaggtacaggctgaaccgtggtcgacgaagtgacagcagctacagcaggcacaggctcgccctctaacccgttgtgcgaaactggtgccggggtggtagttgctgcctcgacacgaagttgagcgttctgcccaacctgctgggcttgagcgggtcttctattactgcggaactctgtcgccatcaaccccgaaaagcgacagtcgctattacagcgtcgaagctcagttgaatccggaatggctgctggagggggggggcttgcgcaggaacttgagcaggtacttgtgcaggtacttgtgcagatacttgtgcaggtaaagctagtcaacacttgatcttggttgctgcaaattgaacgaatggagtgtggaggcttgatgtagcgctttaggaacttggtagtgtgcgtgcggtgctgtgaacgacggagcaaactctagaatgaggggagctcggacaaacaaacatatgcagcaatcttcaaaggggttcttgagaaaatcgtatattttctaagggtgcggcgtttgaggaaaggctgcgatcgtacccacgcagccacgaaaggcatggtattcgtttcaaaataccaagtaactccgaacctgtaacggcgtgtaactccgaaccttccactgtggtttgaaaactgaaaacttctggccgcaaaccacatgcgatcggtaattttggttcgcaattcctggtaatttaccagcaaaccatttttttgcacagttcatggttaggtttgttcaaggtgtgggttttatactgtcctttcggagagtgaaaccgcaggtgcagtgctttaacaatgtcgcgcgattgttgcacgaatgtcgttcgataatgggccccctacttaagttacttcacaccgttttgctttacactgctgccaacttggattggcaaaggtgtagtagcctctaaacgctctttttaatacatttactcatgcattcaactaatcagcttgagcccacccgtgggatatttgccgatcccacgcgtgggcttttaagctgggtagtaaaggttaactaacgatgtttcagccagaacgccaaacaaactcgtcatgattcttgcccatttcacgacttgggcgcgcagccgccggtgatcttccagcacattgtgctctcgtacatggacaacaagttcaccagtgtcgcccacacaatggcaaaggccaagtaccccaccgtgataatacccatgattcggctagacccgcccgtgcgcttcagctcttgcgtctcagccttctgacggggcagcagcggcaggaacgccagtgagagaagcttcataccgtagcagatccagatcgtgatggtcacgtcacggcgaacgacgtacgtgtcggcctggatgtccttcagccacacgtggaactgggcgttcacgagcttcgccatcgagcgaccgaatggggtggtcaagttcgttgtagcggtcaacagtccgtacaatgcaccttcgtgaccggcctccgcgagctctactacaacatacgtggcgatcatgaaccggataccgtccggaagatactcaatgaccggcacgcccagccaaaaccactggttgcggacgacgtcccagaccgtgagcattgtcatgaacgcatcgatagagagcgcaccgcacatcgtgatgatgatgatcgtgcgccagttccagtcgagaccgtacttgcccgtgagagcaagtgtcgtagcgtagaaaattgtgccaacgatcgtcattacgctgttgttgaacggcgttgcgtggacccagtagagcttaatgttgctcgacgacacgatgttgaagctgttgaagacaccggagaagaacttgtacgccacgatctggtaaatcgcgcgcttctggagcatcccccagaacgtcgacatgtactgcccgaacgtgggtttgtccgtcacgcggtcttcgtggagtaagaaccacgacacgaacaccagcggcgcgcagatgatacccgagatcagcatgagctgctggaaggtgagcgagaagtcgaaggtgccagcgtattcctccccgttcatgaagaaggcgatgacagcggcgccgagggcggtgaacgaggtcttgacggcgtacacagcagtctggacacggccgcgctgctcgatgggctcgcgttgtgcgtactcaaccaccatagcgtcagctgccacctcacataggagataaccgaaggacgcaagcatcatgggcaccacatactttccagcggagctcgatgcgctttcgttgatgctggcaatctgctccggagtccattcttcttcgtcgatgttgtgcatggacgcatcgccgtagtacggatcggggacagacatggccgccatgatgaagagaatcacgacacagaagacccagccgatgaccatgtacggacgacggcggtagcccatgatcgggaagcagtcactgatgacaccgaagaacatcttgtagcaccacgggatctggaccagcacggtcgccgatacgacgatggtaccctctgcgttgaggtagccttgaagcacggggtagatgacaccaggaatgatgcccgccaagaagccgacgccagcgtactgggccaacagtccgatgcactccttcgacagcaggttcagcggtttcccttcacgcaatgcgccattctcgagctccgtgtcaatgggcttggatggggacaccaggtgtgaatacgcagattcgctttgggtgggcttgaggtcggagagtcggctaagtcggtcttccagcacggctttcactgtgtcgtccgtcaccgtcatgctgctctactagcggttcgagcgcacgtactgaagtaagcttcgcgatgaccggagaattgcgtaatgagacttggaatggaaagacccaccaccaggacaagatacacagaatccttcgagggatctcctgagttgaatcacgacgggtggtgcatcgttcggcctcgatcagcgccttcggacaagctcgtctaggtttgctgacccttgaacgggtggtcgagcaccgtccacattcaatcacgcgttcttctttgcggtggcaacacgatgggcacgatggaacaccacgctgttgacgacagcatgcttcgtcgtcggataagcccgcagcgacacttcatcggctgcggagggatgtgacttgcgggagtgtatgggggcggagcaaatcatcgggattaattaatccagcgtgtggctgcggtctcgacaacacttgacacacatccccgccgtcggagaggcgctggagctggacacctctgcatcgctcaagggcggcagtgagcttgcaggtgaggatgccgaggcggctgaggataggaacatggtgctcatagtctaaattatccggcggcgctcgtcggttatttggtttctctcgccagcatgggagcttcggacgagcagcagcagctcgtgctgaacgaggagggtcaagcactcaactatggcgctgtaccatcggatgcaccacccacccccaccaagtcggaagacgccgacctcgaagacgaggtgctgcgagatggaccgcctccgcgtctgctgtcgcctgacgtgctagctctgctcatgcagtacgccggcatcggtttcgtcaatggagtgctccctgccgtcatctaccccgtgctccaaggttacctgaacgctgaaggaaccatcgtcgtgtcggctacggtgctggtgcaactgccatggtcgtacaagatgttcctgggaatcctgagcgactgcttcccgatcgcaggcttgcgtcggcgtccatacatgctgctgggatggctgctgtgctgctgcatgctcttcatgatcgcgaatttccctgaggccgcgccgtactacggagaccccaccatgcactccatcagccccgatcaatggacggaggagcaacgccaaagtatcaaccccaacgcgcccgacgctgccggcaagtacgtgattccgatgatgctggcttcgttcggatacttgctcgtggaggtgccggccgatgctgtcgtgattgagtatgctcagcgtgagccgatcaacacacgtgggcgcattcaatcgtggatccacagcgttcgcatgggcttcaacgcagtaggagcgctcgtcgtggcagtcgcgttcaacggcatcgagtatggcggttccttcgacttctcgctcacttttcccgaaatgatgttcatcttggggtgcatttgcctgcctctgggtcctgctgcgtggttcctcatttacgaggacgaagtggtgccgcccaagttcaaggaatatatggcgcgcttctgggggattttgcagaagagggcggtgtatcaagtggcggcgtacaagttcttctcgggcgtgttcaacagcttcaacatcgtgtcctccagcaacatcaagctctactgggtccacgcgacgccgttcaacgcaagtattatggccattgtggggacgttcctgtacgcagcgacgctggctgtgatggcgcagcgtggactgcactggaactggcacgtcgccatcgcagcaactgtgatcttcggtgtcgttaccgacggaataatgacaactttggtgacatgggacgtcattcgtagccagtggttctggcttggtgtgcccgtgatcggagacatccctcacgctatgcgcttcattgtcaacaactatgtcgttgtggagcttatcgagaggggatcggaaggcgcgttgttcgggctgctcacgactgccaaccacgtttcgtcccccttcggtcgcaccatcgccaagttcatcaacgcgcgcttccacgtctggaaggacgacatccttgccgacacgtacgagacgcgccgagacgtgaccatcacgatctggatttgttacggtatgaagatggtgtcgctgatgttgctgccgctgctgccgaatcaacgagccgccattcaagctctccgtcgccagggaggcgtgagcaagcgcatgggcatgtggatggtggggatcttgatgtttgcgctcgcgtggctgacgatggtgaatattctgagcatgaacccggcaacaaagtgctgggcgatcacaggaggctgcgcaccgaagtctcaccactctactctgtggtaagcagtcagcccgccaaaggagaaaacatgtattgcaaaaagataaaacagttcgtttcaggtgtatggagaacctacactggacttgtatatgttgtcaataatgatcacgggcatcgtgcctttgtcattacccttggattcgcgatttgcccatgaacgagtgaagtaaggtcgtgaaatgtgcgacttgtgagaccatactttctacttcaacgtgcatactccggataatgaacaaaataacaatactaagtgatgggtgctgccggataagatggtgaaatcaatgggtaccccctatattccggttctgtaagctcaattgacggaaggacgaggtcaaatcgcacgtttgctggaccgccaaggcggtgggttgcatgcagcgaagcgacattgtaaagtacacgcacactcgagcaagctctcttgcaacgccgagcagcagtgagtggcgcgagctgacgcctgcgccggcatgaagttccgcctgccaccggagacgttccccgagctggatctggccaaggaggacatggacaacatggacaacgtggcggcgatgatcgtcgactcggcgatcgaagacttcgagaacctccgcctggactacaacgggctcgcagataagcggtggaaacccatcaaacgcaaggctggcgtcatgctgtacgaggaccgctccatgcgcgagaacctcaagagagagtcgtcgctgtcggacgtggccccgtcgccaagcgggatccacccgctcatggcgattggcacgacgagaggagagctcaacgagctcatgttcgggctgctgaacccgacgcgagaggagatgctggccaagtcggcgtgcacgggggactacctcacggactgcgccgagctggcgtccatcatttccccgacgccgagcaacccgctcagatcgctgcaggtcaagtggtcgctcatagggagaggcccgatgttcgtgagcgtcgtggttcgaccccgagacttcgtgtacctggagtccacggggatcgcacttgacagtcacggagagcacgtcgggtacaatttacgccactcggtcgaggtgccgggggtgcgcgagctccacgaccaccaaattgtgcgcgcgaacatctcgttctgccgactatttcgccagaagaaacaaggactcatcgaagtgttcatgacgggctgcgtcgacgcaatgggctaccggtatccgatttacacgagcattgtcatgacgcagattgccgacgcgctgctgtctttccagcgacttcttgtgaacgcgaggatgaagaagctggcgtggatgctgaataacaagcagaagcagtcggtggacacgagcaaaaaggccaagagcgagtgcagctcgtgtggctgcggcgttggacggtcgattctatcctgcagaagggagtgcacgctctgcagcagcgccgtatgtccgctgtgccgggtgcctctgaaagtcgcgtggaagcctcgagacgaccccaacatgttcacgagcgagaagaaagcggcggcgaagatgcgctacgaaaaggcaaaggtgtgtcgcccctgtctccgcaaagtggaccgcacggacgctctggacgtggccgtcgacgagatctgccgctcgtctccactgctagccgccgagtctggcttggccgtcacctcggcgtcgtcgctcttctcgctcatcaactcggaccagttcggccgcgattgcttctttcactcgtaccaataaccacatacatcgcatgtatatatatgggcgtccccaacacgcatgcactcagctaaaagaagtaactagcccgacagccaatgtatcaaccaactgcaacttcgacctgtaccttcacgtcgtgttgcaccacaccacaaaaaacttcaatcacgttggcatctgactgaaaaatcgacgtgagacgtgtacgtcctctctcggccaatcagatcgcgccgtttccccaagggacgttagcgcaggatcgcaaagctcactccggaatttgcagctcgacgtcagtactctctgtcattcctccctccgccatgctcgccggtcgccgcagcttcctgaccatgggcgcccgctcctcacgcgcattgtccactgccgcagccaagcgcgtggtggtcgtggacggtgtacgcctgcccttcgccaagtccggcaccgtctacaaggacgtgatcgcctacgacatgatgcgcgacgcgttcaagggcctgatcaacaagacagccctcgaccccaagagcatcgactacgtgctggccggcactgtgatccaggaggtcggcacgtccaacattgcgcgcgaggcggcgctgggcgccggcatccccaagcacgtgccggcgcacaccgtcacgcaggcctgcatcagctccagccaggccatctgcactggcgcggagaagatcctgtcgggccacgccgagatcgtgctggctggcggcgtcgagacgttctcggacgtgcccatccgcttctcaaagcccatccgagagaggcttatcaacgctcccaaggccatgaagaagggcccgatgggcgtgctgaagctgctgcaggggctgaaactcggggactttgccccagttgcccctgcaatccagaacttccacacgagggagatcatgggctcgtccagcgaccgactggcgactagatttggcgtcacgagacaggagatggaccagtacaccatcgacgcccaccagaaggcctacagagcccatgtggagggcaagtacaagggtgagatcctgtcgtacaagggaagcacggaggagaacggagtgaacccgaactcgacgctggagaagatctcgacgcttaaacccgccttcatcaagccgcacggcacccacacggcagccaactcgtccttcttgacggacggcgctgctgcgacgctgatcatgtcggaggagaaggcgctggagcttggatacaagccgaagtcggtgctcaaggactggctgtttgttggcgtggacccgttcgagaccttgctgctcggacctgcctacggcattcagcaaatcctggccaagaacaagttgaagttgagcgacatcgactacttcgagatccacgaggccttcgctggtcaggtgctggccaacctgaacgcgctggcagagcccaagtactgcaaggagctgttcggcattgaccaggccgtcgggcgcgtgccatcggagaagctgaacacgtggggcggctcgttggcgctcggacacccgttcggtgccaccggcagcagattagtgaacacggcgtccaacaagctgcagaaggaaggcggcaagtacgcgctgctggcggcctgcgcagacagcggacttgcgtacgtcggcttgatcgaaaactacaagaactgagtagactcatggcgcagaattgaatgcccggagcttgtcagcaccttcagctcacagcgaaaaatgaatatacccatcggtctaaaaaattccagacgctctagcaacacctgcgtgataaccacattacgcgttcacatgagcaaagcgttggctgccatagcacattgactgaaggtatacggaagtaagcgtgtggttctcgaggcgatatatgattgcaaaaggatctatagttataaaacggcaattagacgagcagcacggcgttgatgcagccatcgttctccggcacgttggtgatctgggcgtacttgccccacacgaccttgcccgaggtggtgacgaggccgagctcgctcacgtttacctcgatgatagtgcccttggtcatgacgccgagctgcgtgtacagcgggctctgcgggttcttcttgacaccaaggatgtcgagctggaacgtggtcttgagctccgggtgcgtcacgtgggccttcttgaagcgcatggcgctggggcgaatgaagcgctcgtactttggcggcttgcgcgtgaagttctcgcccacgaatgtggccttggtgatcatgcgcttccacgccttgttgcggcgcttgcccgagcgcagcaccttgaacatctcgtcgtcggcgatgggcttgaccttggggatcggcacgtcccacttgccggccttctccttgcgcttttgcttgaccgtgttgctcagcaccttggcgcgcgacacgccctcgcggtccagcaggtaggacggcacggcgccgtccgggatctcgtcgtcgttggcgtgcttgttggtgcgctcgttgtgcagcgccagcgtcttcttcatggccgccttctccttgaagcgcttctggttgtacagcttggcgcgcaggccgtgcaccttctgggcgaactgcgagcgcctgtgcacctcgcgggcctctttcttgcgcttcttctcggcggcgtccatgcgcacgccgtggcgcttgcggtgcatctccatatgctcgtgctgcggcatcttgactgtcgagtcctgtaggccgcgtacgcgctagtctcgtccctgctccttcctactgcggtctggggccttgcgggtcctttcggggctggcaaaacgtcgacttgcgagtcttttcggagtgcggcttccaacgccaaccataaatcgtacttagtcgagcgtctacatcgtacttaacgtgataatggtcgagcaaagacggggaagtggtacactgtaccggtattggttgtcaacgagccagaggatatcgatcgagatcatgatgttgcggaaggctgcgcagcgcgtcgtgcagctccgggcgggcgcctacggcgtgcgggccgcatcgaactttgccgcaggcgcgaaggtcgacgaccccgagccgttcaacccgttcgaggtgcaaccgggatgcctgcagcccggactgccggccacggagttccagcagcgccgcgccaagctgttcgccaccatgcccgacaactcggcgctcatcgccaacgcggccgaggtcaagtacatgacccacgacatcccgtgggagttccaccagaacagcaacttcatgtacctcacggggctcgaggagccggacgcccacgccgtgctgctcaagacccagaacaagtgctccttcgtgctcttcgtgcgtcctcgcgacccgcacaggtgcgcaacggcgtagtacaatggaggtggtagtcgttattatgcggtgctaagctggtgtgtatatatggactgatgatacagcgagcagtgggatggcgctcggatcggactggacggagccaaagatcggtacttggcggacgacgcgttccagctcacggaccttgctccggcaatgaacaagctgatttctggagtggacaaggtgtttgtgctcaagcctgatggtggacgatactcgcccagctttgtggaggcgacgcagggcttccacagcaagttcttcgcgggagacttcttggtggagcagctgcgtgtggtcaagtcggagaacgagctgaaccgcatgcgatttgcagcggacattggtgcgcagggatttattgacatgatgaagaacacgcggccagggatgtcggagttggcgctggggtcggtgtttgagggctctatcaagaagaacggtgcactgtggaatgcgttcccgaacgttgtcggttcggggtctaatgctgctgtgatccactacttggcgaagcgcgatttgctccgtgcgcacgacttggtgctggttgactcgggatgcgaggttgctggtggctacgccagtgacatcacccgcacgtggcctgtgggaggaaagctgtcgtccggacagaccaccatgtacgagttcgtgctggacgtgcagaagaaatgcatcgaccacttgagaaccaagatcgaagccaaggagtccatcactctgaacgagctgcacgattactccgtggaactcatgatgaagcggatgcttgattttggcattttgacgaacaagggcggccccttctcgcgttctgcgattcgcgagtttcagaaatacaacccgacgcacatcggccactatctgggcatggatacccacgacacgccccacgttacgcgcggcgcgccgttggtacctggcatggtagtcactgtggagccgggtatttacttgccgaagaacgatattaatctgcccgaggaattccgtggtattggtattcgtatcgaggatgacgttgtggtacggactactatacagtacctggtggtgttgatagcagactaacttatctttgtttgtcttactgtagatcacggagtctgggatagaaatcacgacatccaaggtgccgaaggagctgcaagagatggaggcgttgcgtttcgagtaggctaagtatcccttttttccattgctcacatcgataagaactaagctgatgcgacagataatacacccacgttgctggagtgccaatcttttacagtgtcattacatcgctcaagtaccggtagaccaacctcgtgttgtacgagagaacgcatcacccaccacacaacgccaatgttgcattgctattaatcctcgggctctcagctatccggatccgatttgctccatgccttcaaaacgtcgtagtggagcgcgtggaaagcctcatattcttgcctacacacagacagaaacggattataacaactatagtgtgagtgatgagaatctagcgcacgtaccgaagttgggcgattcgcgttgctctctcgatccgcggtaaactgtatagcataatcagcttctcttctgctggtgcagacagtgtagatgtctctgtagcctgtaaaatgcaaaccactcacgtcactaatgatacttgccatgcgtcttactaatagcaacacgcatacctgactgatatgattcggctcaatggacgagcttttagactctgcgctcgctacctcttcctgctgcgtgcgtgaacgatttcgagagcgaactcgaccacgccggcgtttctcgtctgcttgttcgggctgtgctggcggcagtgcgctagatgcttgggtctgggagccagtcggtaaatgaaccacaggtgcagctttatcgattgtgaaattagctggagacgcagctgaagcctccgctgcgggcttcgtcttcacgacaacgcagcggagccgcgagtcatcgttcgtcagcggcgcaagcatcaacagacgtccatctgcgagcactgcgacaccagcctaagcactccacaagtcaaaacctgaactgtcacctgaaggcaagttgcgcctgtcttacccgctgtcgagctttcaggtacttggcgaactcctggaacggggtaatgtcaccatgcgtcgccggcacgacgatcgtctgcggaggctaccaaggccacagcaatagaacatactcaacgattagtgcactgctccaacttacagccatgaaagcactgcgaacctacatgttgtgggcagcatttaacgagcttgtccacttctgcgtagtccatgcgcttgaccacatccaccgagttgagtctgcccgccaccaaacaataatcaatgaagtaagcattggtagcctctttagacgtcgaagaggcgtcaaccgttgccgttgacgcattgcaccgccgaaaaacacgcaaatgtatcacaacgagacccttcttttggattaatctgcagcgttttggtccattttccacggcccaaaaactcacccaagcgcctccaacgcgttcaaatccaccgccggatacggctgtgcccgcgccgcgtgggccgcagccacgcagtcgaagaggtacttggacgacttgtagacgctgaacgccaccatggcctagtgagcggcacgcaggaacagggggtacacattaaataccgtacccccaaattaaaagtgtacccccacttcaattttagccaatccgatcttctcccgcgataaagtgcgtcagtgttgaacttaccatggcgacgccggcgccgcgcatccagcgcctgagcccggacgtggtgaaccgcatcgcggccggggaggtggtgcaccgccccgccaacgccgtgaaggagctgctggagaactcgctggacgcgggagccacgcacgtggcggttaccgtgagccagggcgggctcaagctgctgcagatccaggacaacggccgcggcatccagcgccaggacctggacatcgtgtgcgagcgcttcaccaccagcaaactcaagagcttcgaggacctgaaggacatcaagagcttcggcttccgcggggaggcgctcgccagtatctcgcacgtggcgcacgtgaccatcacgtccagaacggcggaccagccctgcgcctacaagtagggtgtgcaataagagtttggagcggggaatggggtgatgtggactaatggagtgtggctgcaatggtagagcttcgtaccgagacgggaagcttgtggccaagaagcccggcgagtccaaggaccccaagccgtgcgccggaaagaacgggacgcagattgtggtgggtttcttagaggggtgggatatttgaaggggtgttaactgggctggttggtttgtcgactgcaggtggaagatttgttttacaatctgagcacgaggaagcaggcgctgaagaatgcgtcggagcagtacagtcgaatcttggatgtggtgcagaagtatgctgttcactttggcgcgaaaggagtggggtttgtctgcaagaaagtaagggcggttgtacccggtggttgtgcttgctagagctgtcgcttaccggcgttgtgctatcgtgcttttcagcatcgcgagtcgtcgggcggagtcaacacaacgcagtgctcttctcagctggacgtcattcgtaccatttacggcagcaaacttgcaagcgagctcacgccgttcgaatacgaaagagacaccacggctggtggatcgatggacctgcaacgcaaagtccgtggatacatcagcaacgccaattaccagtaagtttcctcacgatattcctaatgcccaccctactgtttcgtttgctaatttgactggttttctggcagcctgagaaaaagcaactttatcctgtttatcaacgaccggcttgtcgagtgcccatcacttaagcgggcttgtgagtacgtctactcgttgtatttaccgaagaacacgcatccgttcatatatttaagcatggagcttccacctcgcaacattgacgtgaacgtgcatcccacaaagcgagaggtgcgtgtaattgtattctggaaggatggcgatctttgggctaatctgtttacttgtcgatgcctttgtacaacaggtgcacttcctacatgaagaagatatcgtcgattcaatcagccaagcgattgaaaagcggcttaaaggtagcaatgaaagtcggagcttctctgtccagccgatcactgctatgctgggcataccttcagcaaccagcggtgatgcatcagccaagcagcgccgacgcgaaagtgtgatggaagaggaagagaaaaaggaggaagtggagtcaagcgatgaggaaatggagaagcgcgagagtgatgaagaagacgaagctgaccggtctgcagactcaatcgagcttgatctaagtcaaaagccgaccccaccttccaagaagtaccaaccagcgctggtaagcttgccctttagtaggtttctccggcgcatatctcactcggtctcttgttgcgtttggtgtaggcaccgcagcgcctggtgcgaaccgaccatcgctccaacacgatagacaagtactgttttctggagtcgcagaggactcagttatcgcagctatcacagtcaagttcccagggcaccgcagacgaccgcgacaccagcccagacagaaggtccaggcgagaggattcggcggaaagtgactcggacgcggcaaaatcgctaaacccgagaaagaggaagctgtccgaaacgcattccagccaaggtgcgatcttgtgtttgtagctgtgtacgcctagactttgatctgatgtgaagcatacacgacctacagaacccgagccggacaaccgtcgcggaagcctcgaggccactcaaagcccgcaaatgctatcaagtgtccagaacttgctgagtttgatgcggcaaaagaaaaataaggcgcttgcacgggtaggagtttgtttgctgtagtgccgagagtgctctctcatgtctaatgctgtgtgtatgctgatgcttctgggtggtagctcttccgcgagcacagctttgttggggtcgtcgacaagcagttctcgctggtgcaataccgcacaaagctgtacatcgttcggcacgacgaggtcgctttccacgtcttctaccagcaggtgctgcagcagtttggcgagacgcggccgatcactctgcagaccccgctaccagtctacgacctggtcctagaggctctcaagaacccgcgcaacggctacgacgaagaggacggcccgagggagcagctcgcggacgagatcaagacgctgctgatcgccaacggccccatgctgttcgagtacttctcgctggacatcgactcgcagggcatgctgcgcacgctgccccagctgctgccagaccacgagccgtcgatccactcgctgcccgagttcgtgttccacctcgccaccgaagtgaactgggaggaggaggagccgtgcttcgagagcgtggcgcaggcgctggcgcgctggtacggcgagatgcggtacccgggcaacgccgagcgcgaggcgctggtgctggagcacgtgctgttcccagcggccaaggccgccgcgttctgcccgcccaacgagctcaacgacgcgcaactcatcacgcccgtggcctgcctcaccaacctctacaagatcttcgagaggtgctgagggtcagtggtcaatggtcaagttgcactcactttgagcaacagcagcgcgtgcccatgcgtaacccagaaatgcatggagcgtgccggcgaaagatactcctgggcctcctgctggccacgagaagcgatggcgccgccatttcgtggccacctacatgcattacatgtattatacatgtggctacagttccttccgtttcaacactggcagtgccagcaaaatcaaaaagcgcgcagtctttcccacacaatcgtcttgcgtccagtatgccctcactatcactaaatacggggggtctcccccaacggagcaacccgacgaaattaagtgcgaccggcggcttgtcttcacagctcggttggcttcgctctctctcgcctcccccgccggccggccccatgaacggcaacaagacgcactcggtgcacttcgacccgtcggtggtgcgcgcggacccggacagcgggcgctccacgactctgccagccgccgccttcccgcccgtacccaatgcctccgcgtcccctgcgcccctgacggccgctccccccgcggccaagcgcaacagcgtcgtgcgcaagatcatgctgcagaccatcggcgagcactgcgaggacacgacgctgccggccgtgcagagcttcgtggccggcgtggagagctactgcgccagcaccgagagcctggccagcctgggcaagtcgctctacacgtcgcccgcgctcgtgttcgtggtggacgaggtcatgcgcgtgatcctgtggaacgactgcgccgtcaatctctgcggctactcgcgcgaggagatggccggccgcaacctgctcaaggagctgccgtaccttgtgcccccggccacggccgccgtgctggcggacgcgctggcccactgcgtccgcggctcgcccgtggccagcgtcatgctggaatttgtgagccgagagcaggccaaggtcacgctgctgggctcgtgcacgcctctggtcgggaaccccgtgggctccggcatgctcgtggtggcccaggaccttacacacctgccgttcgcgatggtggacaagaaggcgctggccgagacgccggcagtgctggaccagacacaagcaacgcgtacgttacgttcggttgatgagttgatgggatttggtggggaccaagtgctgatgatgctttgttttatttttttttacagcgtcagagactcaggcagttgcaggaagcaacgtgcccgctgtgcctgcttctgcggttcaggttcccgtgcagaacgctgcaccggcgcctgctccagtgcctactgcagtgtcgtcgaatgcgtcgcagattccgggctggagtgagatcgcaccgaactactcgatcgagtgcgtgctaggacagggaagctacggacaagtggtgcgctgcaagcacctgcccactggcgagatcgtggctatcaagaagatccagaacgtgttctcagacccgatcgacgccaagcgtattctgcgtgaattgtgcatcctgcgccagctgcggcaccccaacatcgtgcagatccgagagatcattgcgccgctggacatggaccatttccaggacctcttcgtcgtgtttgagtatttgccatccgatctagagaagctcctgcactcgccccagttccttacggctgagcacttgaggtggctgctgctggatttgctcaaggcgctcaagtacatgcactcggcggaaattgtacaccgcgacctgaagcctgccaacgtgctgttgaacctgtcgcccgtggcgattaagatttgcgactttggtctggcgcgcggactctcgtcgtctgcgtcgacaacaggacgcaagcgcaagcgtctgggcgacggctcgaccccggacgaaaccacattgcagggcgtcggcgtacaccctcgaacccctgcacgacggatccagcgccagcttacagagcacgtcgtcacacgctggtaccgcgctcctgagattattttccgtgatcacgattattcagccgcaattgacgtgtggtcggtaagtttttgtcgcgatgtcctgtgttcactatttggggtgttgaacaagcagtggaactaactttttcgatgctaatacctgtaggtgggctgtatctttgcggagctgctgagcatgcagaaaagcagtgtcccgtcgcactaccagcgcgagccactgtttcctggtgtatcgtgctttccgctgagtcctggtgctggccaagtagcgttgccgcaggacagtcgtgaccaactcaacacgattcttgacgtgcttggtaccatggacgaggaggacatcgcagagattgcagaccccgacgtgcagttctatttgcgcagtttgccgcctcggccaaagcgcaacctacaggagatgtatcctggcgctgagcccgaggccatcgacttgctcacgtggatgctcaagatgaacccgcgcaagcgcgcgaccctcgacgaagctttgtcgcacaagtacctcgccagcattcggtcgttggaggaggaaatcgtggctcctggaaccatccagctcgagtttgacgagaaaaagatgaacgtagcggagattcgccagcgaatgctgagcgagatccgattctaccaccccgctgcaggcactggtgcagctgtgagcgcttctgctcgggcggtacaagccaacggtggcgtgagcaagaaggccaagcaaggctgagcgcagcgtaaacctgactacggcgacttacttatcacgagtagtaactctgttcattcggccttgccttccggtagagcacacaccgatgtcttgatagcaaccctgatctacaatgttgcaataacactcgaatgaatacaacactgctgtaaatcctgtttactgttcgtatctgtttaacccttggcagtaatacccgccactgacattcgatacgagttaaagttgagaatgagcgagctatacttcgtgagcgactccgggtcgctcgccagtctggtgatgacgttcattgccgtctcttcatcggcattccacagcctgaacaacttcttcatctgtgcccggtctttcagcgcggcattgagcttcgtggggtccactaaggcgtctaccttcttcttctgagctagcgccttggcagcattctctgcgaccttgattctgtatccgttgaacgtcaggacgagggagctgtacttggcgaaagtgtgtcgattctccgacagtctttggatgacctgccttgacaccgtcgcatctgcgttccacagcttgaagagggccttcatcttcgtcaagccactcaacgcggcgtcaagcttcacggggtccaccaaatcatcaattttcgcgagcgtcgacttctcgtcgtggtcggcatggctcctcggaaaccttttgtcgtgctcggcccaaggatttaacgtgtgcgtagtcgacactccagcttcattggagagtgctgtcgccgaagtagcagcgcagttcctgacgaggacagccagcactgccagcagcacgtagcctacgcgcatggttgaccttggaccgaaagggaaagggaatgagctcgagtttgcgtggtgttgcgttgcgaggcaaatctcaaagtgcatctttgagccacatgttgccggactgcaaattgaagtgcaggaactgtgactaaaacaacaaatcttgatctcatgactttggcacatgtatccgttctgccagagttgtgggacagtacttttatataggattttgtatgggggatcaaatacggcatcctcgatatcttcgtaaatcccgcagaactagccaagccagtacggtacaacctaaactaaagtagaaatatcgcttgggcaggtcgcacgaagcgatggagctcttaactgctagttgtggcatcctctgtgtaacaggcgatcctccatacattttgccggtcctccagtggtgataatcaaacatatgtttgcagcaacctaatgcaatttttgggtctaggccacacaattaaaccaaatgaccagcttcagtgaatagatcgctgcaagattatacgaatccgtgcttattacgtctcctaacgcgctctgtcgcgaaggagaggtgcaaatgtgttcatatagagcttggctcaagattagcgaacatatgtattttacatacaaacatgcagtgtaagtgtggtgcaccactacagtagaggcagcagtgtcccacaatcgtgttcgtgatattagcgcttttcagatgcagcattctactgttttcatgtgaagaacaagcaaaagaacagtaccgacaaactacatgttccttctactttctaaagatgtcgtttgtgcaccgcaaatcgttcagcaaagttacttttggtgtccctctccaactgtcccgtaactctggcagaacggataggcggaatgatgcacgcacagcgaactcaacagcaaataccacttataccaatgattccttttagttagcgcgggtgaagcggtgatattttgtattaccaagcaaaacataagaatcaacttacgaaagttgctactgtagcaatgctacatattatttcaagtacttcagtagcattcaaaataaaatgctggtggaatctaccttctgcatgtaggaaaaatgaagaaacaagaccatttcgaaaccattgcattgcttcgcattcgttgtgcatgccaacttcatgtagctagtctacgtttgtaaatccaggcattgcactctgttcccagattaaatatttaccatatttacaactgttgagtcttagtagcgaaatcggaatgtgaagtcgacacctgcggtcaaagaaagcattagccacgcttgctatcagtacttgaagtagcaactcagtcaccaacgtaccaaaatgcaccacacgaaagcacatcgtaacagccacccagacgataagtttgccctggaccagcgacatctgcgtgtcgagtacaaatgcaagatggtaccatgcccgcatcccacagttgcgcttaatcagcatgacgagtaccacgaacgaaaatacttgaagtagaccaaaaagaagcaaaatctgaaccttggatcccatattttcgctcgtgatgccggtcatttccgagtgataccgagcactagggaggaataccatgatcacaatatagcagccataaaagaaagggactgcagcctccaaatacgccgtcgcgacaagacattccatggagaaaaacacttcaagtgtttcttctagtatattgcttcgtcttgtcagcgactgtatgcggtgtgaatctggcatttccttccttgactgggtggatgcgggtataatctgattgcttgcttccaacccgatgtcttgcgcaatacattttgaatcgctcgaaggtcgagggctttgctgccaggatgatagaagagtcggggcctgttttggacgcagcttccgtgggaatttgattcgtcggcccgaccagtttatccagaagcttcttgttctcgtcggatagagcatgtggaaagcacgaggtcactcgaacatccgcgcggacttgtttactaaatttttcagggctccgacaaatcaaacagagcgtttctaccaaattatcgttgtcgtggccatttccaacgacaagacggagcctcgacataatggtaagcgtgcgcttgtgcaggccgtacaacatgatagctgtttgcgacagatctgtgatcgtgatggctatcacggcaaaagttgacgtcgcgctctgcatacaggtcgcaatgtagatggcgttgaaaaaatcgaccgtgaagataaccgcttcggggaccaggtcttccatgtgcgccatgcatcgaagtacaatgctcttcaagaccaccttcagtatgggtagaagaagaataacaagtatctggtatcgggaaccttcagcgtagcgaaaaagggcttcgtaggccgggtagattgtgcctatcatcacttgtatgcacacaaacaaggccgtgctctgcccggaacagctctggattttacgtcgctcttacatgtaggaatataagttagtgtaccgcggcactttgtttctacgtgtcaatgacagaaagaagtaaatacatcgtattggttgagggtaaccactttagttgtattaacggatttttacgaatagtggccggtcttgaaattactagcggcttggcatttttaactacttcacttcttattattttaaagtacagtttaggaaaactggaggaaggaacaaccccctcttctcccttaggagtggtttttcaaccatctacttaaatagccacatgtgactattcccgactagcgttctccctatacactaacagtagagtcagctgtacgtgtaaataacagttagttagtgtctagtaaattttgctaccatgtatttgccgaacgagcaccactaatttttgcacaaaaacggaaattactaaagactttttacacttcaataactttatctagttccaatccttctggttttctatattttaagaggtaagacgcttttaattcgatattgtggcccatattgtcccaactcaacggtactgtcacattagatgctgccaaatctactctagatgccagtgcagcgccagagccgtagttacttgaagtgccagtctagaacggatagtcccatccgttaagttgtgttttattttttaaggaccaactcgtgcggacagaactgatagtgaggcgagatcctctattaacagcgatggcggtgctctatttgtttttgaaagcatctacgcacgtaagactgttaatatgcagcgactgtacctgataaaatgggtagggtgggaaagaccgacctggaacctggcccgtcacactccgatcgagatggtcgacgagtttgaagacgcagagctgaattcggcctggcccgaatatatttcgctagaagacgggtctcaagggcgcagagtgtttagatctcttccgtaggtaagaaagacattaactgcaatcagccttaaggttaatatatatcatgattattctcttgctactattgccgcttgcaaatactttgccctctaaaatagacctctaaaatagacctcgcctgtctcttaatatgagtggacacgagataggcgagggctactttagctttgtgctttggtggaggccgcttttaggcccagaaactcggtttggcctgtctagaatggcatttctgcgtttccaagccgcagaaaagcgttttggtcgggaaacagagcctcaagctcggatcttagaccgtactggcgagatatataaatcagacgtaggtcttaattaagagctggctggattaaaatcgagattattaacgagataataagcatgcgttggccgaaatatctgcaaacggcaataactcgtcaactaacagtcagcaaacgtacagctaacagtgagttagtgtctagtaaatttcactaacagcaaaacgccctacactattctcgacgcaaaaaatatctagttcgaaattcaaacgacaacccccaaataagttttggactacaggcgtccccggcctattcgccacagtggtaattatgatgtttgcgaatcaacaagattcaggtggtctgaacatagatgcgtatgtactgacttactacaagcttagctcaagaatacggtggaggtattcctgcgtcgtgccacttgtcgcagtaggtctcgctgtacacgcatctaagtcaatatgtttgcagaagtagcgcacagatcttgagaaccgcttgtacttcctgtgcgaggtacattaaaatatacagccgggactagcccgtagctacttttcagtttgccagggtttacgaccgcgtgctacgcacgcggatcttaaaccacaggaagcgttcttgcttgaacattacgtcgacttggtattgaaactacaccctgatccctaaaaccccttttccccttggggcacacaaccctagacccccctctacctcccccgaagggggagcacctcgcttcgctcggtagtcggcaggacccgcctgcggcgggagttgacgacaccaaggtgctagctggtacgcgaaaagtggctatttggttcatcaattccagacaaaaagtagctacttcacaataaatacccttctccctttagccacaagcgaaacgagcacgtattcgcagagatagaggtgttcattaccggacttaccgccgcggcactagggcttcgcgaaggctaggaaatgtaaataacagcattttgtttttcagaaagcctaccagacagtagcagaaaaaagaactaaaatatccctcaagccaatgcttactgttctcttgtccaccatttcatcgtccattatcaaacacaacctgctcaacatgaattcaatcaactgagcaacgcgcattaagggtgatcatgcagtaaagagatcactaactgaatgagatggaatctgtacttcagccgaccgatcttaaagaccgtttgatactgaataggagggtacaaaaatcattttcggtagtgtgaagcataccacccaatggcatctcctgtgcttgcttcacagccgcagcatctgcccggcaatggtgcactgatattagtaaggggcatcggcgtgctcatcggcgtggcgcgaggcatcaatcatcaccggtgaacacttcaaggcgggatcccgtcggcatgctgttcgagcgaaaaaaatccgatggatgtcgcttgagtggcagataaactatctaccacaggtatatatacttgattaaagggtatgcaaatactaggtaatttgacttaatctcaaccggatgggtcaacatagcagcataatttgattagattacgggatatccagtataacaggtattttagctaaaaacacctggagcgttcataaccatatttagcaggtatgtgatttgagaataatggcacctcagtggccttcactcatggactctggataaaatccagagaacatgaagaagcgtacaaattgatcccaacgctgcaagatttggcgaaatacacgaccgcctgctacgactcgatacgatataaccagcagcgggtagaataccgggcccattgttatcgcgaagaacggaacggggaacatcaagtgggacgagatggcagcggaacaaacgacaaacatactggatgcagatagtggcagcagaaattgtcgaatccgagatatgacaaggccatcgattaagaagcgagattgatccgaaaccaggaaggtgattacaaacgtgactatcccggcacgaatccaaaagccgtaattttcatgccatcccgctgccggatcttgctgaggaatattttcttggatcaacacgaggtccacggtgggcatcggggcgccaatgcaaacaaggagaacacgagacagcgaagtctcgcttgtgtattcatcgagagcaagcagtcgatggatacagtacttgccgccataatagctgacttgcaggctcttccagatgcgtagaagctttgcgaatcgggtccaccctcgggcatctatcgatccatggctgataaacgacggcgatgtttctgctggtgatgccgtcatactccaattggagttgataactatgcttgaccagtctaaaagcaggaactagcgccaccgttaacggtgagtcgacgggcaaacctataagctaaagaaaaaaatactagtgcgcggctacttgcagtacggatattcgcagttgaagaactgtcgttaggcggcccaggcgcgtgtgtcatcgaacgaaatcctcgccacttttgcgcaacatagccacttcaacttgcgctttcaatcgggaaagtaatgcattgccgtgccagcgatatagtgctcgtactcgagatgtccggattctgagcacaccaccgcagcgtcgttggaagcgaggcctcaaacccgaggcgtcatgcactagttttgccttcagcgaggcagtgatgaattttgaatttttattcaaatgtcaccgttattttacttgatgcgcgtacagggcaaatactgtggctgcgaagcaggcgctggagatgcctgcggatcgtaaaataagtacttcctattagctttagctcacaacacaaaaaaaaagtcgaagtacatgtattccaaaatcctcctatctcagcgttcgctgagccctggttgcatatcaagtggtcacagttttggcgtgttgtcggaacttcgtattggtatattatcgctcccgagaactgcgacccccccccgtccgggtaccatcatcctgatgatgatcacagttgtttatttaacttcagttaatagcgtcctgaaaaatccgaagccacttcacaattggaggcttgttgcgtggtttatctgcttttgtcatgtgtgcttctccttgttgcgaatcattgtattcaaagcaatcgagtacttgtcgtagtcgtaagccgaacattcggttttcgatacttctggaatctcggtgggctactgcccgaagttaacgtaacgcggtcttccagatttctgtctttccttgttgcaccgtgaccagttcctgccgatgaacttttctgttgcgtgtcagccagagtgatgctgttgcaatgctgcagaaggcccaccataggcagcgcgccgctttcgcgtgctctggtgttagttctccgtatgcgataatacattgcttgaaccgagctgtgagggctggtggagatcgtggagtaacaaagtattggtacttcgccagctccactagtgttactgttgaggaagatttttaacccccccccccccccccgtcacaaaggcttgatataagcagcatgtgaaaattaccatatggcggccatatgttcccacatgcttgatatcaagcatgtgaaaagcccataaactggtccgttggtccaatttggtactcgatgcacagggcttgggttgctaattgcagaaaaaagttcaatgaattcacggccagtacatacccttcccgccagtaaagagcgatggctagtggcctctcattctgcaaaacgacaatccaaggcacgatgcggttatcgcaccccgtggcggggcgctaaggaactcgtactgcgactcgaactcaaagctggtgaggagcgtgatagtttagatcacaagcatcaggagtatatcaaggacgcgtgcagcggctgcgaggttggggacagggagaagaacaatgccgatccgctgacgccgcaaacaccggccgggccgtcggtaatgccggtgcttacacccataagctcagctccatggcaccagctgaaaggggcgcaggacgatagattgaccaagaaaccaacgatgcttgggacggcgcccgtagtagactccaacgacattgtgcacacatttgactgcggaactagcacaaccatgtcgagccatggtacgtgctgatgctcgcgatatcattcatactagtgctaactacatgctggatgtatgctatttagatcagcgacctcttcaaacgcaaaatcaagcgagaactatcctctgccccgcagcaaagcaggtgtactaccgctggatagaagacggcggcgtgcatgacccccaacaccgacaacgttactcgccgcagatgctacattgtttccgcaagtatgacaagatcttcgtcgatggactggacaagatggctgtcaacagggaggcgtgcaggaggaaaggtgaagcaccggctgatcatgtcgggcccgctaaaatgctgaatgcgcagcccttagccgtcggaactgcagtacacactaaaacggtacgcatcgctttgggtattgcttccaccttgctctaatagtatgtgtgaagatttgttttccaggacggacctcactgacgcaagatggaaagcgcatcgatggcaggaacgtggaggacggctgcgacaatgacagcggcgctggtaatgaggagatcgatgacatcagcgacgaggagggggatgacagcgaccacgaggaggaaggtgttagcgagaatgcagcccgtactgccaaggtggctaataaataggaaggtgccagagttgagtccgaagatagtgccgcattggagtaggctagtaggaatgtaactacgtgagtaatcgatcagtagcgcttgcttcacacgtttttcctcatttcgttttctagttcaagacacaatttcgcattcgtagtcgttttgcacgcgtctagcagcaaagaaaactcactcccagtaaaagggccatttccatatccgtcatatcaagcatgagctctacggatttaataaacgacgcttgataagcagcatgtgctcccataaactgggcaggtgaatcgactttgttccgagatacggttgagatacggttcctgtacttttttcatctatacaaattccaagtaaaggctttctataacatgcttgatatcaagcatgtgaaaaaatagtccgtgcatagaaatccgggcctcgtgacggaggggttaaatgggtcttatgcagaacaggtcttagatttgatcagagcgtactttttctttgaacttgtgtcacatctgccatgctttgacgacgtaggtcgcctcactacacaatggagcgactgccgtggtgggtgctgggaagtctagctccctcagtcatccaaccccgtgacggaccgagccgccgcggtgccctgggttgcagcccaagcgacccccgctacagaatccgtcgatagacgacccccaacgctgtccgctcgactctcaagactgcccgagtgccatctcggctgggccagcactgctcgcagatgcccgtgtgctgcgagggcctggtcgactattacgacgacccgcgcaaggtgagcgccgtggacaagaacgccaaggatgtggacacgggctctgtgtacgcccctgcctgcggcgacgtgatgaagctgtacctccgtatggacgaacacgacaccattgtcgactcgttgtccacgacaattggctgcggcgcggttgggcgatttgcgttctcctcggtgaccacggttcaagggcaagcgcgtggaagagcttcaagatcaagaacaagaacatcgcgtcggatctgaagctggcgcccgtcaagctgcactacagcatgctggtgaaggacgccagcaagatcagcctctcggactaccaagcgcaagtggggcggacgggcgggcgtgtacttcagcatgaagtcttgagccatgtcgtctccaacgatgagtacgcgatcgaccgccaggaagtggcttatggcttcgacgggtcaactctgccttgcacacgtgcagcacgacatgctgcgctatgcaagctgtgctatttgatggtcgaagacacggaaagtgacgtggttctgaggcagacggcgcccgtcgcggtaactacaggtgacgcgccgaccggtgtgtgcactggtgcaggcgaaggcgctctagatgccctgtgagtacggagcacgtcaagtccacggagattatccgggtgcattgctgctgctcctgctgtccaagtccgcgtagctcgccgctgccgtgctccgagtcgagcgtcaacgcgcgcactttggacgtcaccgtgagcgagcctggcacccgcgtatcgatgcccacgacacccccatggtgcgcgtcaggcggtgcgtgatgtccacgcggagcccgacgaggtgtgcgcgcagtcggagagcccggctcggatggctcgaagacacgcaagcgctgctgctgctggtcttgcttctgctgctggtcggccagggttgttcgcagtgcagcgtcttagctccggagaggttgttaccgtgctgcggctgtggtacctcgctacgaattggagcgcttttttcttccagccaagcagtatgcttttcttgtgggccacaagaccacaagttgtggctagctagactatacacttctaaagtatatgtaccacatacatgctgtgatagtaggtaaactaagttaacgagttgtgtgtcagttacctgtggagtatcgatgttgagagtgtgaaaggaaacactggtttcaaaccagcccaggtgtgcgcagcgcaccgtgcgctgctttgactgaaaggcacctgcagtgctcagtggacgcctaccagatatacattaacgggctgtcatacctgcagctgatatgccgcgtcatatacgcgcagagatctcgcgggacgcagatatcgtctcgataaactgccctacccctagatatatgccgtgtagccatcataaagttttgtcttgttgttagtatactttatgctgaccatcattctaacatatgcatccttcactctacgggcatatcgatgatcatatatcttccgccaaatcgaaaagacgctcagttgcgaatttgccgccggcggcgcgaagtcgacagcagccaacacttcgaaaggtgagcgtggttgatggctttgtatgcacttctctatgagaggactcacctcgtgtttgattgcagggacaacggtgcgcttaacctactccgccgttcactggcggcgtcggtgcatcaatgacacgtccagcgaggacgaagagaacacgccgccgaacatccagcccagccaccagtacgaccgcgacagcaagcgccgcatcgaagacgccagcgagtctgccagcgctacgggcacagcaacacctccttggctgccgccagagagaagccgccccaagtccaagttggcaacgaacccgccgccaagccaggagtcgacgtctgcgcccgtgacgccaccgagatccccagcggcgcttcagcctcgccacgagggccgtcgtgcgcgtcgagtcgacggcttccagccgctcatcgagccgaggcatgttccaagacttgctctcgtcgccgctgaccaccgatgatctggacgagcttgcacgcacgccgcgtcctgctcctgtccgagcagcgccaagtacacgtcgtgctggctcgggagggctgccgccaccacgtaagacggctgttactgcccccagtagtgatgcttcacagcagccatcgactcaaggtgccgccgctgccaccaaccacgatgccgccgaagcggccaagtaccccaagctccacaagacgtcgaaccgtctcggaggcgtggacttggccggctttcgcgacacggtgggcgccaagcgcgctcatgaagaagacaaagacacggcggaagctagctacgccaaagctaagcgcatccgtgccatgaatgcaacaacagctctcaagacaaagctggatggccttgaaaacaacgccagcaccatgcgaggatgcatcctcgagacgcttctgctgctccgcgaagagagcgagcggaaggctgccgcccgtcgcgccgaggaagatcagcgccgccgcgacgaaaaggcggccaacgaggcccgccttctggaagccaaggctgaagctgaggcgcgccaccgtgaggagaagctggagagagaggaccgtgcgcgccgtgcgcgcgaagatgcgcgcgcccgcactcaagagctgctcatattgatcggcgcactgactaagaaggcgtgagcggaaggcgcgcatgctcttcgaagtgaggctatcattcacgttctagttactatatacttgtcgcttaccactaagcctcaaatcaaacatgttgttcatgatccgctagcgtgtccgtcatgggttacgtgatcttctagcgccttcatcatcagatgtacttctcgtgctgcgtacacatctctgtgaagtcaagtgcaagacgcacgagcatcgagttcggctctccgtcgcaaaacgtttgcagcacgctactgccagcaacatcgagataatgaagcagctcaattcaacggcaacgaaaaatgtattgttgtatgcagtacaaacacggctagttcgacaccctactcgctggatagctccatctcgcctgaaaacgtcgtgcgtatctgcgagatgccgaccgtgcggacgcgatagttagccattctgaagatgttgttgattcggtgcccacgaagctcggggtcgtacggcagggggaggacaagcggctgtacaccttttgcatgctccccatgccccactccgccgcctgcctcacggacgtgatggcgttatgaagcgtccgcgcggagcttctcagcgacgggagaatcctctcgagatcgccatctttgagaggagtcaggatgcgaccgaccatgctggtcgaacacgggaaggccgagtccgacaccacgttcatacgtgtgtccgggcagagggtagggtcgagcaacttggaacggaagcccaaggaggtgtcggagtcgttccacgacccggggcaattgtgcttacaccaaatgatgcagccgtcggctgcgaagcagattgtgccagtcacgaaaatggtgtgcaaccacccgttatacatggcgttctgcaagtccgcattcgacggctgctgaacctacaatatcattgatgttagcattctatcatagcaagtaacattttacaaactacaactcacccttaagttcttcccatcaatgaagccgaatgtgtgtttgggaagcggctcgcgggcttccacaagctttgcgagttcggcttggcgagcaggcgaggaccaagagattctggcaggagcgtagccttttagcgccagcgacagcacttcctcggcgcggcgtagcgtcctcgatatggtgctcggcggagccccaaacatcatacacagggagctctgctccatcgacccgacgtaaaagcacagcaccaggcccaggatctggtggtagtgtcggagcttcgggggccgcccgcgtgccgtgctgcgtgggatgtagtaaaagcggctgaagcgccgcagtagttggtggaaagccggcctgaaagcatgcatgaattagatacagcgcagcaacttcagatagtaagtagggtcgcacctggtcaagcgcgtcgcgtttaggaatttgatgtcgcttccgcgcgtgtacaacatcatccacgcggagtcgcagggcgtgtccaggcactgggtggtcagatagtgcctggtccgcatggagatccttcacgcctcttccacgagcttgtcgtacacctccctgcgcacctcgtgcagcgtctcctcctgatcgaccagggcgctagctagcaccagcatcgcatcgacgtcctctgcggccatcgctccggagcttgtgtccgacgcgcgccaaattcgaaactggtgaaatttagaagggatgcagcgtcggcggtgtccggaacgaaatgacgggtacattcttaaagcccagcaagcgtctatcaagccgcctgattcagggcgatatcaagcggacacaagtgacgcatgtacgacaattgcggtggagactttgagcgctatgtcaacatatatctttttaaaccctgtcatatctgctgcaggtatgacagcccgttaatgtatatctggtaggcgtccagtgtacagtgcagtagtcgcgaatgggatacaattcagcaccacccatagaagcatgaacagcgcgtgctattgcagctaatgaattttgctgtcaagagaagttgggaagggaggcatgtttgattagtagctgatagtacaagtagcagtagttgcaatgcttttgaacacaacccactgccaaatacctcatgcacacctattcacctaaagagagcacaacgaagtgttgctagaacagggagccgaacgggtcacgcgctgaggaactaagtcatgtcatgatcataagctgtgaatgtttggctcaggtctttcgatttgagacggtttcaaacgaaaagaggcttacgaacctaagcacgaatcgcgatttaaccgcatcaatcgaaagaggcgtgtcttgtgcttcgtttaagctatcgaatgctttgaaatgttaagaacgcgcggagtggcttcggtctagaaaaactatctccattttcggaccccctaaactcacgattttatttggggcgtgtgacctcaatattattttcaattttaacgtattgtgtattatcagaaagctcgcgctaaaagcaagcaaatcagagtgtttttacgctttttacgtgtgcttttcactttcgaaagatggatgtccggttatttccgaaaattgattggtcaacttcaaacgcgattatctcgataactccaaatggcgcctaagcatcatttcgtttgaaaccgtctcatttatctcacaatcagcatgttcacaagtggctgtgcgcacgggtacaaaagtatcgcgaaatcgttcacgtactgggtatcgacttctcgcgcgcgttcgacacgatcgaccgtgccaaactcctcaaagttctacagcagtttgtacacgacgacgaaatccggttgattcgactcttactatccgacacaacgctttcactccgcatcggccaccagatcctgcaaccattcggcagcaacacaggtacgccacagggcgactcactctcaccagtattatttgttatctacctagaagcagtacttagagatctagctagtcaccctgcattgccgccggacctgctccagcaaatgatcgtgtatgcggacgatgccgactttatctgtcgggaccccgccctcgtcgagctcatccagacccatgccccggaagtattcgcgcgctggtcgcttcaaatgaacgcggcaaagacggagcacacaattctccgccgctgcctgacacctgccagtgacgacccccacgctcgtgcagaggaagacccatggaggtctacgcggaagcttggctcgttgctcggagatgccgatgacgtatcgcgtcggaaaatactcgctgcggctgctcttcggcggctctgggcggtctggctgagatcgcaccgtatcacagacacgacacgaattcgcctctacaactgctacgtactgccgatactactctacaactgcgggacctgggcgcttacaccaacggagcttcaccgactcgaaagctttcaccgtcgccagctacgatctgtcctcaatgtgcgttacccgtgccacatctccaacgctgatctctacgcaacgtgtgacgagcggccgctccgtcaccggatcacatctgcgaggtgggagtttctcgggcacattctacggcgaccacaagatatcccggtgtttatccagatgaaggcgtatttcgcttcctcagacagcagcaggtggagaggtaggccccgtaccacactgcctcttgtcctcgaccaggaccttgatgctagtgggtgtggctaccgcctccgcaccagctcagacttggagagacttcgactgcttgcccaagaccgacgtaaatggaaggccctcatgactaccattgctgactcactgccagccaaaggagactcgacgtatgcggacaccacactatgccaccgactagctaaactgagactagcgcaggtgtaatttggctacgcgtacacgtaaatcatagcattgcattgcaatcagcatgttcaaatcctggacctgatctgcataagaaccaaaataaaggcgaccactgttcatcctgtccaatgttccgcgaaaaccatccatacagcctctgcatacggacaggcccataggaggtgctccaatgtctcgttgtggccctcccatcattatactacgtagtacttaatgggtatcatctgttggattgcatgggtctggacccgagtcattatcacacttgtgacctaatcgcaatatttatttttggtattgaaacttcattttcacatgagcaccatgatgaagaagaagtcgggcatctccatccgcgcttatgcagctgcggcttcagcgacggcacgacgcgagccacagaaccctgttcgccgtccacagcaaattgatagtgcacttcaagtgctcatggaagagcgagagcgggccacccttcagaaggctattgacagtcggccgattaatacaaaacggaagtacgagggctaccaaaaggagtttgtagagtggagccaattgatggggtttggcgatggtgttactgccactggtagcaagcttcatctctttttggacacccaagtcgtaggcagagagtcgaagaagaagaagaagggtaaagtcattgggggcatcaacggtgtacggctacgacaacgctattgtagacctatacaaccagcaggtggcgaacaagatgaacgctaacgaccaccctcgcacgtacaaggtaaaacaactgctctcaaccgtccaggcggaaactacggcgacacggaaaaaaactacaccgatcgcggcgtgggatcgttgctagatggctaccagtctgaagcccaattcactcagatttgtgatacatttttcgttttgaacgatctcatgggaagagcagcgtttttggtatctcatttcggcttactgcgaggcgaaaacattcgtgatctggaattcgccgacatgttttcccaggaactagacaaagaggggttccagccatacactgcgttggttctgctaatccaacacggcaaaacgaatacgtttggaaagctgcagcacgttggcttcatgcggaataaggctgttcatttatgcccagttggagcagttgctttctacttgtttgagcgctttcatctcaactgtgaaccctttccgtgttttcgaagatcggaggattggtatgacatcaagttcctacgtggccgagatcgaaacaaagccatttcgtacaacactcacaagaaaagctacgaggctgtattcgagcatctcggtcttacgtacaaagcaaaaagactcatatcaaccgccagcaaggcgtacggcagctggagagcgctgatgtcgacatctctcaaacacgccgacatggccgatggggtcttgacaccgttgaggccgtatacgctgctcctctggctcgggaggcgattcgcgctctgtcagggcacccgccacgttctcgtctttattacttggagcgtaccattgtagacccgcccaacgacctcaaacaacaggtttttcctggactcgagagttacaaacaggtcggtacgatggcggtcaacgtggcagagaggcggcggagatgaatgcgtatacttcgctgcgtgcctcgcagcccaggttgttgttgctcgaggtgctgttggtcgacgacgagtagtcggacacaacgatgggacggagccgcatggctcggtgacaacgcccaggacgtggcgctgtacgttgcacacattgaggtactggaagctgaagatcgttacgagggcgccgccaggctgaggatgatgctcagcatcacggtgcaggcgtacttgtacgccgtgacgtcgcagtgtccgccctatatgtccacaacaacctgtagcatgtagaacgtcacaatgagcggcttttgcccacgatatacatgccttggtacacaaccgtcagcagtacgtacagacacgcgctcagcagggcgggcaggcttgcgttctcgagcgccatgttggccagcatggccgacgtcacaggccacgggtagcggcggccttgagatgagttaatggcgctcggagaaggctcgcccaaaatttgtcagcgagacagccaatcaaatcgtagtatttgggtcatgacccagcgactggtatctcggggtaacacaccaaaaagcggctggtatctccggactgggtcatgaccgagtcatgactttttgcattttactacgtagtaaaatgcaaaaagtcctgccttctcctccttgcgtggccgaccccgcggtcagggaccagcgccagcgcctcggcaacctgcgcgcggcggctttcgctcgacgccttgcgtggcatgttttcgacacgcacaaaagcaggtgtcaaaaacgattatgaagaaccgttttcgacattttgaccaacttcaacttgcttgcactaactgagttcggacgatgccgtcagtactccttgccggcgtatttcttgagctgtgccagcaggtcctggtacacgagctcgttggcgttctgggcccaggtgaagtccaggtgcgagaaggctgcgacgggcttctcgtgcacgatggtgccgctgggtagtgcggaccggatctgcgcgatgtcggtggaggtcgcgaacgtgtcggtggcgccaatgtagaagcccgtgcgcgggtagaccatcttgccgactgggtagacgggcgggtcgaagctgccgtacacagccttgttcttgcaaatgagcgacgagcagaggttgatccccaggagacgcacgcagctgcagccgaagtcgtacgacgcgaaggtgtcgtcccggatgccttgagcgtagtgagccatgtttttgacggaggtgccggcagatgtttgtgataggtagacggattcgtgtgacgttcaagttgtccgaaggtccggcgatgagactgattgacgagttgcagatgtcggccacgttggtgccaacgacgtctgacagaagcactgtaagaaggtcgttgtgcgtgtagtgggatccgaatgaacacactcgctagggaagctggtgcttcctgtaaactcttgcttgtaatctagtctgcaatttccagattgagatcggcagggacttcgtcagatacctccactgcactaccggtatgtgctatcctcctagggcctaccaacctccgagtcttatcttacaccagcctcgactgggaccgtcctcggtcgccagcccgatgcgtggtcaggtcgtgaagacgatcgccccactacaccgccccaccaagacttgaccacacatttggaagtgggcaaccttggatttgttggtaacgttgctcgaatgtaccagtgtaccaatggaatggtaccatgtacccgcaacatagtcacttcaagttgaagtgctaaagttgctctaatgttacatgtagttgcactttactcgtcgcggctacgtactgcctcaccatcacagggatatccttgtacagtgaactgagcgactcccacgagtcctcaattggctccagacccttccacccaaccagtatctcgtaacacctcttcgccgagttccaccggtgctctttcagctcagcaacggtcaggacaatgccttgagcagccacgtgctcacgaatctcctccgttacctcgaaggacgcgtccgcgtagaacttaaggcgtgaggcatgtacgtctgattccgcgccagtcactaggtgctgcacgcggaaagagtgttcgtctgcaccaacgatctgatacgggcctatccaagtgacaagcagcttgtcattgtgtttttggtccactcgagaccgcaacacgtagtcaccgacatcgaaattcgccactctggctagtctttgcgttttctgattctgttttgtttgttccgaccttgccacttgcactcgcttgtgcatctcttgcaccccggcacgcagcagcgccagctttgcttctatctggctgctagttgtaccgagctctaggaatgtgttgtcctcgccgttgaatccaaagtctagcggggatgcagccgggaggacgcagaacaactccactggtgctttgttgcctagcgacggaactggtgcgtggtttaagttcgactgtaccactggatcaaaatgtacccaatcacgaatgtccagaggcacatagcgcggaggacctggacaatgtccctgttgactctctcaattgacccattagtccacggactgtatgccaccgtaaagcgctgcccacaggtaagacgtctcgccacctcggccaccacttggttcttgaagtgggtgccctggtcgcttatccatacccgaggtacttcgtagcggctgtgccagtcgaggattgcttcagctgtcaccgctgctgtaggtacagcacacggcactaactcgcaaaagtgggtcgcatcatcctttagcaccagtaggtactgcaaggcgccaaatgattcaccaagatgtaggtagtcccaatgtaaagctccatttcgttcgctgcatcggaatgtctctgcccatggtctcatcaccaccttccccccccttttacatgctggcacatgaggcagccagcaaggaaagtcttgactagggcggagagattccgtatgaggaacctgcggttcaccacgttcatcagcgcttcgcggcctctgtgaccctgcgccccacagtgggcgatcactaaaagtcgttgaaccagactcgtttcggtgctaggaacccaaatccgttcattaccacaccgtagaccagcatcactccgtgtcaggccttgtggccggtcgacaatgtgccgttgctgagtttcttgcagctcttcaactgttggccattcaaagttgccgtcgctgaacggccgaattcgcggtcggtcgttcggtcgactagttgagtcaccggactggtcctcatcacgctggcggcgcagtgtgacgcgcttcactgccacacttggtgcgggtcgtgtgcctgcccatcgagacaccatatcagcccacacgttgtgtgctccatcgatatgctcaatagtataccgaaaatccatcaatttcatggaccatctcaacagcttgccacgaacatgcttcttcacctcacgacccggcgcgaacgcatgaatcaggttgcggtggtaacagtacatgcgagagccacccggctgcaacaacaagtagctcagcttgtcgcgcgccatgatgatagggagggcctctttttcgatagcgctccaattttttgtgctccagtaaaagtaccaccaagacagataagcagctcatgttgctggtcctggatgtctgcatcacttttccaactgggcacttgcgtcacgaccactgaccatccaacgtctgaggcgtccgtcagcaaaaccatctctgcatccggctttgggaacgcgagggtggctgcatcagccagagcctgcttcaccgcgtcgtacgctgcgccttcctgctcggtaagtgcgatcggtatacccgcagccgcacgcttcgttcgccttgacgcctgagccatcgctttgtccagtgtgtcctaccgaggacgtgctaatcgcgcaaagtctacgatgctgtctctcatccagttcgtagagcacaagaactgctggagttctccggcattcgtcgggtagggcatcgaccgtaaggcctggatgcgctttgagtcatgcttcacaccttcaccgttgatcactttcccacaccacttcacctcacgtttatatacgcaggacttcgaaacactcaacttgaagccgaacttggccgtcaactcaagcatttcctgcaacttgtccaggtatgtgtcaatatcggcggcgtacaacagtaagtcgtctatccagacgaacaaatgcttgtacagcagtgctgcaaagcaccgctcaatggccgactggaaatacaacgcagcgtcggcactgccttgaggtactcgtgttggggtgtagatcttccggtgggtcatgtaggacaacagctcctggcactctttggcaagtgggagctgccagtagcctttaatgaagtcgaagaacccaaagtggttgctgcctctcatattctccaaatcaacgtgcaagttgggcattagtccagccataggctcagtctgtgcgttgaaaggtttgtagtccacagtctgccgaaaatcaccagcgccacgcttccgcacaggtagcgcggcacacgcccaacggctggtcgggttctcgtaaacccacccgagcttcaccaacatctcgttgaacgactcaagaaatgcctggtattcgggcgcatacaagcgagccttcgccttgtacggcctacagcccgtcttcatcctaattctcatcggttccacatttccaggtggatcatcgccgagaactagcctccagacatcataggcgtatacaatcgtgcgcagtcgctcgactttgtcggcagggaagccttcatccagagcacgctggatcattgcctctactgcctgtcgaatcgcctccgcgtcattgtctcctgctgctacttcaggaacttcttcatcgtcatctccgtcgtcgcctcttggtgtggctagcagctccaattggcgctcgacatcgattcctaaagccttcagcacaacatctccaagtaaaaattcattttccttattatcgagaatcaaacacggcaccggtttcagaataatgacagggccagcggcggtcatgagcgagagccttagtttcgtctttcgcgcgcccacgtcttccctccacccggcagcttgcactcgatcggggtcttcaatgtcatcacttcaaaattcacacctcgctcaccaattttcttcagagtcgtagagctgatacacgatgtctccgctcctgagtccggacagtattccacatccacgacaccaccaacacgcagtaatcgggcttggcccactcgatcgggtaggcactctctaattcgtcttagttttacgattcctccttggtttctgcctccgtgttccaggggcatcgtcggctggcttgtcggggcagtcggcttgacggtgctggccaccacaggtccaacacccacccttaggtcctggctgggcttgttccgagtcggtccgaaatatagtcctctgagctgccggtgcctgaggttcgcgagggttttgcttctcacgcacgattctgccacgcttcggggtccttgaggccaattcctgctttgactcctgcgtgtgaggtcgtctcttgttcttcgtgtgagctttgtcctcgcgatcaatttccaacgccttctcactcacgagcttgaacagcagcgaaacactggactgtgcggcaggcaagcgaaaatcaatcccgttcttcactcggatttccaattctcgaggtagacagttggacaggaccttgcacttcttcttgatcccgtcctcctctgagaacaaagccgtcagcccattcgttttcactatcgtgttgcacaggtggaaatagtccatgactctcacatcaatatgagacttggttgttgacatcactagctgagcctgaaacaactcgtcgatgttcggcaaagcgttgttcttaaagctccgtacggtcgccatgatctactcccagatgaactcatcggtgagctcgtcctttgacttatcccatttcgtctcacacagtgtctcgaggaagctgtcgtcgaacgagttgcgtatcgaacgcatgacagacttcaggtcttccccagacgacacacagcgcaccctcatgatctcttcgtactcgagccgaaggtcgacccagcgggtgagcgcttcgtgcgagatgtattcgaccttcggcgctgcagtgaccataaagatcgggtgcgcgaccgaagggtagtcggtctcctggctggtcgtcagcggcatcgagccacctaccaaacctcaccgggaccgactcggtctcctgctgccgagctctactcgcgccagcagtgcgcgcaggtttcttacccttgcctcttgttggcctggcttggcctgcttgcttcgttgatgcagccgcagtcttccttggccgcagggttcgacccgtgctagccgcctgctgagtcgcagcggcagcaggagtcgcatccgtcgacgtcgttccgttgtccatgtcgtttccttcgacactaaagttaactttgtagtgggattcgaatgaacacactcgctagggaagctggtgcttcctgtaaactcttgcttgtattctagtctgcaatttccagattgagatcggcagggacttcgtcagatacctccactgcactaccggtatgtagctatcctcctagggcctaccaacctccgagtcttatcttacaccagcctcgactgggaccgtcctcggtcgccagcccgatgcgtggtcaggtcgtgaagaccgtcgccccactacagtgcggtaggaagctggtgaagccgaggttgaggaacatctcatccatattttctttcgctaacgccacaaagtactcggcggtagtgtgacccgtccaagccactggtgccagtgcagctaagtagtcaaccttctgtgcgatttcctggttctcggagaagcccacgaacgcttgtgtggtgccctccgaatgccccacgtagctcaccgtcgagcgaccagtggtggccagtatgtggttcacaaacgccggcaggtcgtagagacccatgtcctccaagtgaaatcccagaactcgtcgtcgtcggtggtgtagtccaggtgcgagcgagaccaggttgtgccgcggttgttaccgagccagacgtcgaagccggcgtcggccaacacgtaagcgagacttttgttgcggaagttggagatgaacgtgaagctgctgtccagcagaccgtgttgcaggtggactgcgggcttgttgggagcagcagcagagccggattggctctcggcgtaagtcttcggaagtcggtacatggtgagcacgtatcgatccgaggtggtgactttgtgcgtctcgatggcgtagctgcgagcttggacgatctcgacgacggtcttgtctgtatctgggtccgctggggcccgataccccaaagagaaccccgggacttcgtttgcagcttggatggacattgtgacgatacctgccagtagtaatagcgcaatgctggctaccggtactagcccaccaaggattctacgagtgcattgccgcatcgggctttcgatgactccaatcagtcgtgagcccttcaaactccaagaagttctgtcatcatactcggagagttgtgtggctaaataaggccaaatcaatcccgtcgagtactagaatctaagtctatgaataagatgatgtattgctgctaccccaagattcgatcgagcaaatagctacaaatgtcgacttgaagccatgcgcagcttcaccaccgttcccgccgttacgacgtcatgtattccagcttgcaatctacccttaccgattcgtgtagatggaggctggtttgactcgaatactactgcatagttccttcaaacccggtgaacttgaaaacccgcgacactgcaaatacaggaacgaagacactgaccagcgtgctgtcgcgagtgatacttgcagtctgatacattacgtcgaaaccttacattgtacactaacagctactagacctactcaaagatcaaggacttgagcaagttctccatgccgtccatcgcgtgcgcgatcgcctccatcgagctcgcgtacgagatgcgcatgccgaactcgtcgccgaactcggagcccggcaccacggccacgtgcgagtgttgcagcaggtgcgcgcagaagtcgtcgacgcttgcgagcgccacgctcttgtcagccatgaacgccttcttgcccttgaagtagctcgacaggtccaggaacacgtagaaggccgacgtcgggtacgcgaagcgcacgttgggcatggcgcttaggcgcttgacgatgtaccggcgcttggtgtcgaggttcttcatgacctcggtgatgcggcgctcccccttctccatgcactcgagctcgtacttcagcgcctccacggcagccacctggcccaccgtgttcgggcacgacgtgagctgcgcctgcaacagcgtgcacgggtcgatgtagtactttggtgcggcgaggtagcccacccgcagaccggtcatggcgtgcgccttggagaagccgttcaccagcagcgtgcgctcgtacatgcccggcagcgtcgcgaagctcacgtgcttgcgctcggactcgccctcgtcctggtacagcagctgctcgtagatctcgtccgagacgaccacgacgtggcggaactgcggcttgcgcagcacggcggcgatccgctcgaggtgctcggggctgtgcagcgtgccggccgggttgctcgggttgcacaggatgatggccttggcgtccgggtgcgccgtcagcgtcctctccagctcctgcgggttgatcaggtagttctcctcgagtgtcgtgcgcagcggaatgggctccgcgtacacgagcttgacgatctctgggtagttgagccagtagggcgtggggatgatgaccttctggccgggacggcacaccgtgtagagcgcctggtacactgactgctgcgcaccgttcgacacgagcacctccgtggctgggtcgtacttgagcccctttgccttctccaggtacgtcgagatgaggccgcgcagctccaacagccccttcatgtgcgcgtacttgatgttgccgtcgctcatggccttggcacctgcagccaacacgcgctcgtgcgggttgtagtcgggctcacccacgcagagcgaccagacctgcttgccctcggcctccatttgcttggtctggccgtggatcagcacggtcttggcgaccgtcaccttttggaacatggggttcagcgggtacttgtcggccatggtgatgttggtgccggtctcgcggcggccggtcttgcgcgctagctcgaccgccgtcagggcctccgcgctctgcgccgtcgcatacgagcccagcacgcgcacgaaagcgcagatctcgctgagccgccgcatggccgccgccatgttggcatccgtgaggtggccctgcacgtctacgtagaagaggtacttgtacctgcgggtgtcgacggccgtctctccgtgctgctgcggggcctggccatcccatgggcggctctcgatcttggtcaggtccaggtcgcgctgcgagaagacggcgagtgcgcgggtgagcatgcccctggccgagctgtccttgaagccgaagaccagcgacgtcttgaagtcgacgcctgccgtcttcttgtcgtccagcgccaggtcctccttcttggacagcagcaggaaccgcgtgtacgatgacgacggcgtcgacgatgcgtcctgcggcaccggggcggcctctggctgctgctgctgaaggtcgtactcgcccacgacgtgcagaccgtacttgagcagcaggtcgtagtgggcgtggatgctgccgagcgaggacgactcgatgggcagcacggcgaagtccacctcctcgtcgttgacggcggcgcatgcgtcctcgacgcgcttgtaggccacggccgaggccgaattgtccacgaagtggcgcgcggcgcgctcggcctcaccgccctcgtacgcgatcttgagctcggctcccatgactccgagttgaagtggctggatggtcgggatgttgaagctgcaacgagcttgtcgccgacggtgtcaattggggaatgagagctttacgacgccaagttgccaagacggcggggacagcacggtgggctcgatgccgagggcgaggagagcggctctggttgcgtgacagctcccgcgtcacccgagaagactagcgagatcaagcgcgggaagcttgggtgatcagcttgcaatgcttcagttttggtgtcggcgaccaagcagcatgtttggtcgcgtctctcgctgcgaccaaacgctttgattggtcgcggaaagcctcttttatggtcgcggcccaagccgaaaaacccaaattgggttttacactaccggtagcggattcttccgaatagtacaccggtattacagtagtagtatagacgatattataccttgttccagtgtttactattcggatgggtattgtattaggaggtatttagtttaacttggacttgtcaattgcagcgcagaatggaaagtgcttgatcgaattacgagtttccttgtccacgtgtcctacacagagcgaacttaccaacatcttctagaatgtcctcgacgcttccatgaccaacactctggaacgcactgtaagttgcctttctccgtactcgtagacaggaccagcaaatccttaacactccccctcaacttgcacgtcgacgaccccgcttgcattgcacagctgcatcagacgcggtgttggcaccgccttggtaaggaagtcggccagctgctcctccgtgggtacatgttttagcttgatccgtccggcttcgacatgatcgcgcacaaagtgcgctcgtagatcgcttgtttgcggccattgcaatcgccgacttgttgtccagttgtagcgtggtcggaccttcagacttgaaccccatctcgaccagcaagtacctcagccagagcacctcttgggcagcaggcgagagcgccatgtactctgcctctgccgacgacaaggcgactgtggtgtggcgcttgcttttgtagacaactggtccaccaccaagcagcagcaaaacacccgatgtagagcgacgagtctgcttgtcaccaccccagttggcatcagcataggcacggatacctgttcggtcgcccgactcgcagcaaaaaccgaatgccacgagtagctgtgcctttcaagtagtgtagaacccgaagagcagcacgccaatgcatctcgcgcgggcagtcgaggtactgcgacagcgatgagagaacagcgctaatatcaggtctcgttgcattcgcgacgtacagtagagacccaattaattcgcggtaagtgcgggcatcctcgaacgtgtcatgggagtcatcgggggcgaaatcctggcctagcaccatggggtttcggactgagttggcttcaacttgaccaaagcgcgcgagcatccgcttgatgaactgcgtctgcctcaccaccaactcccccttatcacgtgcgtactcgatctccattccaagcacatatcgggcatctcccagcgacttcaccgtgaaacgtgaacttagtgcagcacaaatcttgtcggcctcagcgtccgtagcgcagcccaccagaaggtcatccacgtacaggacaatgtacacaggagactggccattcttgccaagacgaacaaagaggcagggatcggcacggcactgaacgaagcccatctccacgaacgctgctcggatagtcttgaaccacacagctgcggcctgcttcagtccatagaggcttcgtggcagcttacacaccagacctccatcagcacgaacaccttgaggcaccgccatgtacacatccacgtcgagcgttccattttgaaaagccgtctcaatgtcgaactgtcggatcttcagacgcttgctgcagcagacagagagaaacacgcggatggtgttggtgcttgcgaccggcgagtaggtgtagtagtagtcgacgccacgagtctggagacaaccgagagcgacgagtcgagctttgtagcgcacaatgtttccatgctcgtcaaacttgtaggaaaacacccacctacagccgattaccgtcacgccgtgaggacgcctgaccatatcccaagtgtgattgcgaatgtgagccctgatctcctttcgaacggcctctttccactgcttagcctccggcgaagacatggcttcagcgtaactcccaggcacatccgtcgcggccaaggcgatctcatactcgtcgagccgagggcgcttggagtctggctctccgacctcgctgtcatgctccgagctcatgtgtggctcgttggcaagcaacggaacatcgccttcgctatcagcaccaacacgatcatcatctccattggtcagaagtcgagcctaatcacttctcgcggcacggccaggtcttgatccaccactgaagacgattcggttttcgctgaacggcaaggccctggccgattctaatgcagcaatcgctcgagaggaggagggtgtaggaagtcgagggacttgattaggctcagcgatagtgggcagtagaccactgggacgatcagcgcgcaagtcaacctcacttctagggcttcttctcatagtttcgcttggaagcatgctgccatccggctgcattaccgaggagccccccgcaagcgaaacaaccgtggttccacctccatgcccgtcacctgttcacccgtttcatcaatttccatgtccgctgtggattcagtaggaggtgtgggcacgtacgaagcaccccagtcgtcgtcatcatccgcagtcacgttccttgaatcacggccactatcaatgagaacaacatcgcggtagcgagacggcgggcgctcgtccagcgtcaccgtgcgagtcttcacaagtcgttgatcctcacagtcccagacgctcgacgcgcagaactggttgaacctcttgttggtgtacgcgcctccattgtcactacggagacacttgaccttgtaactcgtctgagtctcagcgagggcgttgaactcgcgaaaccgatccaacacctggacctttgacgtgagcagttacacgtagacgaatctgctgtagtcgtcaatgaacgtgaggacatacagaacaccgcccttggattttggcttcatgggacccattagatcagtatgaacaacttcaagagggtgacgcgtcttcacttcactgcccgatttgcgcgcaaatggacttgtcgtcaaccaccacaaacagcgatcatacggtcatcttcatggtccaaagcggaaagaccaccacacaccttagacatcgcgaacatcttcgacgccgaaacatgccccaacagtagtgggtcatggaacattacgccggcagttttgttccttaccgtaatttaccaccgagaacattcctgaaaccttctttcgggacagcagcgatttcaacgacgacccctctcgaccacttgagagcgagagccacgtcttttcgatatgagggtagctttagaacctgaaccggtcagatctaatagacgttgatttgacgacgcccactttatagcgagagccacgtcttttggatcttagggcgtttcgggaccgctcgttcaaactatattgataaaaccactagaacattacgctagcagattttacaagcagttcggaccagcgcgacgtggcgtctcatcattggctgaaaatctatgtcacaccttcatgttcgcttaagtacgccagaaattctacctccttcttcctcattccagaatttcccggctcgaggaagcttagctgtgctgtcgttggtgccgcgggcagcgcaatccctgtggacattgacgagaacaagttggtgggccacttgaagaaggcaatcaaggcggagaagccgaacgacttcaaggacgtcgacgcagacaagctgcagctcttcctggcgaagacggcggacggcgcgtggctctcatcgaaggaccctgatgtcaccttcttacgaatatcagccttgctgttgatagctacaggagtgctaaatacagacgtgttgctaattttcgggtggaagtagcgagtctcgatgtcatcagttctgctgacaagcttgtatccaagagcgatgttgactttgaaggcagacttctgggttgcgagcacgttctcgagcttgtcgtagaactcagcaggctgaattccctcgtagaggtgcgactccatgttcttgccttggtagaagcggtacttactgtcttccttgaaatcagcagccacattcttttggagcttgcctagactgatctggtactgcttcgctaccaatttttggttggtggggtgggaaatgttgctaatgtataccatgcgccccgtcttgccacgtaccttaatacggtagctactaccccatcgaatgggctgaatatttaatctctttaatccttcgagttcgtatgcaaacatgttgcctatatatgtttgactatattattctccgtagatatgactttataattatttgaccttgtatcaggatcgactttatatcttagtcatttacaaaatattctgaaattaattaattcaaatatttggcttatacctttttggaggtcttaagccattgtctttgactatattgggattaactttttgagaaaaaattaattaattaattaagttcggtttcattattaagttcgacttcaccatcaataagctcggttgtggacttacgcttgcgagctcgaatctggtctctattcttgtcatcgtagtctttttgataagataaacgggcttcgcgtgtgcgctggtagtagcgcttctgcgctgctttgatacgttccttgctagcttggtattgctcaggagagtacgtcatcgttgtatattagtaactttatatttgtcaggatcgatcaacaaatacttggtaattgagaagttgaagacaccatgcttccattaaattattcatttcctctttctcctcctctgtttctctttgtgctctgtgagggttgttgttgttgaggttgtcgctgagcttcagtagcaggaagcagcgaagtgtgctcggtcaattcttgatgctgggcttcagcagcaaaagtcaggtcggtcatttcttgtcgctgggcttgtaacggtgtctcgtccttcgcttcctcgatcatgttgtcaagcttcgatttccaatgttgcgaatatgacagaatcgctcccatcgcaatatcaacaccaatcatctgacacacgataagcgagcggccaggaactgttaaacatcctttttcgtcggttggattctctccataggccaaaacaatgaatgtaatgaccgccaatatgacaggtacgaagcattgagcgttgatgatccaccgtctgaatcctgctctacacaagaaattagcaacaacatattcaaacaattaggggccagaatacgtacgcttatatttcagcgctctggaagcagttccaccaatgtcaacgcgaacatgacccggaaccaccaccagcacgtggatctgcttcttctgcggagctggtacgaagacatcggcaatctcatctgctgggtccatttccacgttcagcagtgtcttcacttgttcaggaatgcctccacttcgcatagaaatcatctcggagattcgctccatggagttggctgacaagctcaactaccccagctccgggtacatggtgaagtggattactggcttcaaaatctatatctaccaacgcgaccatgctctgggtgatagcgaggcggtcattcctaaggtgattcgtgataacaagcacgtcatcaacttccccaagacgaacaacaagtgtgtcttccactgcattgcttatcacaagcaggagggagccaagaaggatcctcgcagaatccaggctctggtgaaacaagccttcaagcagtactgttcgtacaaggagatcacctacactctgggtctgttccgcaatttcaagcctatcgacattctccaattcgatgagcttgaggagtgcttcaagctgaacatcaacgtcttcaatatggatgttgagacgggcaaggttgaatgcattcgctgctcggacaaggactacgattcgatcaacatcctgtcgcacgagaatcacgctctctacatcacgaacgttgatatgctccagcagaagtaccaatgctctacgtgtgagatggtgtttgttagccctgataagctacgcaaccacactaagaaccaatgcgaactcgtgaacatcgaatccttcccagctcagccaaccatctaccaacccgctccgaacagcattcgttccatgctgactaagtactccatcaaggatgctgaccactacatcgatcacttcattgtctatgattttgaggctatccgcaagcctacgggtgtcaaaaacggagagaatactatcttcacaaacgaacacattcctgtgtctgtttccgtggccgacagcttgactgaggaggtgcgatgctttgtcagcgatgacccgaaggagttgctcaaggatatgttccagtacatcaaggaagttgcggctaagattcagcagtacaacgtttcgaagtacgagtctttgctccgcaaaatcatcaacgtccatggtttgactgacgctgaggttcctggtctagacttgggtaagacgtacaagatggatgatgtcaatgcttggattcagaacggggagtttgcttgtttcttcgatttccacagcaagctcacattcggtaagaagcgctcggattatggcaagctgaagcagtgcattggtcaggtaccagtattccgattcaactctggacgctacgacatcaaccttatcaaggcggacctgtttgcagtcatcggtactgacaacatcacatcagtcatcaagaaccctatctacatgtgcatcgccacgtcagacatgaaaatgcttgacattagcaactatgttccggcaggcaccagctatgcaaagtacttgccgacatatctcggtgagtgcaagtgtgatgacaagattcgatgcgtctgtggcctagggaaaggcatcttcccgtacgagtacattacttcatttgacgtactcagtcagccagaagtccctcctaagtcggcgttcgacagtgctcttcgtagcactagcatcagcgatgaggactatgtgcgggtacagttcgtctgggaacactatggcatgaagtcaatcaaggatctactcatttggtacatcaacctcgatgttgtacccttcatcaaggccatcaatgcccagcgagaactattcaaacgtttcgaacttgatatgttcactggtggtgtggtctctctgagaaagtcatgtatcagacgtgcttcaacaacctccagcaaccaagtaaggagcctactgaagcgtttgactttcccgctagtcgcttaagcggatataacacccaggatgctgatgccgatcgtgaattcaatatgacgctagaacacctcaacgacttgctagagcgacaaaagtacctgtgtgggctatgctacaagcaactcacagctgatactgcctcggctgaccgaatcaataacaagctcggacacatcgatggtaatatcttgatcagctgtgtgggctgcaacgttgctcgcaagaacatgtcgctaaagggcttccgccacaagaagctacttgaattcaactcagacaggttggtgtacagtatcgatagagaggagaaggacatctacaccaagatgaaggcgaacattgctggtggtccttctatcatcttcaacagatacgcgaaacgcaacgagaccaagattcgagggggtagaatctgcaaaaagatcatcggctacgatgctaatgctctgtatttgtgggctcttggtaatgagatgccatgtggacggttgactaccatcgaagcatacacagggatcgtcgatgatattgtatatgacaagatctttggcttcctcgagtgtgatatccgtacagcagagcacctcaaaccctacttcagtgaaatgaccccaattttcaagaacacccttatcgactgcagcgatcggagtgtcatcggtcagcacatgttcgagtacaaggaggagcgcaagcaaagccgagcaaagccggctcgcaaactcatcgggagctactttggtgagaagatcctcatttatgcaccgctactcaaatggtacatttctcatggtatggagatcacaaagacttacagcttaatcaaggctagctctcacaaggccatttgcaccattcatggaagccgtatcgagcgcgcgacgagagggtgatgaaagtgttaaatccatctgtaagatcattattgagaaggtatctgactctgatatggatgatttagtccaagagttgaaaaaaatcattacgaaccctaaatcatttgatgcgctcgttatcgatagattcatgaatgaatcgacaaccaatcctaatattcatttggttctagacttgttgactaagcggaaaacgcttagtgagggtagcaataataaggctatgattgctgagatgatggaactggttggtaatagtgcgtttggtcgatctggcatggacatgagcaagcacaaggaggtcaggtatgagtcggacgataaggcaatcaaggccaagattgagcacttcaccttccatggaatggaagagctgaatgattcatgtgaattcactatgaagaagcgaaagctcaacaacaagaacccaattcatctatcgattgcaatctatcagctcgctaagctccgtatgttgcaattctactatgattgcattgacttctacttcgaccgttcggaattccagtaccaagaaatggacacagactcggcttatattgcgttcagcggtgagaagccattcgttgagtgtatcaagcccgagcttcgtgagcattttcagcagcataagtacgagtggttcccacgtgattatagcgaagagatggctcagtttgatcgccgaacgccaggtttgttcaaggatgagtggtctggtgatgctatggtatcattgtcctctaagaactacatttgctacctaccagacgaatcttacaaggtcaaggtttcagcgaagggagtccagcagagtggtggccgcaatggcgacgtcctcaacccagatggctttgaatcagttgttcgcgatcgcatcacgctacagggcaccaacaaggggtttagactcagtaaggagagtaagtcaatcattacgtacacccagactaaaacagctctaaactactattatgacaagcgtcgtgtacttgcggatggtatcaccaccgaaccgctcgacatataagcaactacctggcaggggatttttttgttttataaccatatagagcgatggatcagctgttgtccaaattatactatgatcccaaaacgggctatgtgggtgcccaagccttgtaccagaaggctaaagaactggagccgaagattacgatgaaaatcgtcaagaaatggtactcaaaccagagcgatattcagcgatttcaggagcagaagaagcgatacgatgggttcaaaatcgcatcgactaaccccaattcgtggcagatggacttggtgttttgggagaaatgaccaatcttgactgcgatcaacatcaactctcgcctaggctacgcaaaactactaaccaacaaaactggcccgaccgtactagcagcaattagggtttttgtccgcctccataaggttgacattctcacaaccgataatggttcagaattcatgaaccaacaggctcagaaattattcaaaactaagaaaattgaccatttcaacaatgagcctggagatcacgccaaaatgggtaaaatagaacgcttcaatagaactctgaagcagcgccttgtcaaaatcgaaccaaagcgactaacccagaagctcatagctgctgttattgagaactacaatagcacgacccatcggacgattggtatgacccccaacgaagctaaaggtaaggtaattgaatctgaactagtccacaaccaggctgaagctgagaggattgaaaacgagttcgaggtcggtgaaaaggttttgtatcgactaaaaaagaaaacatttgataaagaagcagcaagatggtctaaggctgtgtattcggtggtaggtattgatggctaccgcatccaaatcaagtcgaaaaacggacacactctttacaaggggccaaacgatctaaaaattgttaaagcagaaacatctgaagctactatcaacagaggtgatattttagaggtggagaagatcttagaccaccaaaagatgcgatccggcaagtacaagtatctcgttcagtgggtcggtgatgaacttgactcctgggagccacaagataatcttagattagtcaataagaacaagagatcaaccttaaagaatgagtactggaagttgataaaaatgagtcgaactagcttcgaaatatgtttaatagagcaatgctctgtaagcgttgactcatctatatctatcaatctattttccaaaaataatgcttaaaaatatatgacttcatatatagaatgtgttgcaactgcgtagagaatcaacgtgagcttgtacagtctgaagaaagctgtggataattcaagaggttagtcgaatcaaaaatgaactcagagattcagacccagtagccaatttccggaaaaccgtgtgcaatctacagtaccgcgaccagttagaaacgatatttggtgtgccgtttcattgcatcaaggatcgatacatcaatctcctcaatgagcgaaaccgtatctgtcatacgtatcaaccatttaggcatgactccgttatcccaagctattggtgagtatgtatttaatcgatgctaatattttttttatgactaccatgatatagttagacgatgtttcccaactttacatccctcgctcaacgagagcaaaagcggcaggagctactcgaacgagctgagcgccgagtttgtcaagccaaatccaagcgccttatgtacgaaggtgcatcatgggctagcgatatcgcgaatggtatcactactgttccaaagaaatcaacacaatccgctcagtcggatatttcggttggccctgacgaggctacgccggaagagttaaaaaaaaaaggctgaatattgaaaactcccaaaaaaaaaactgagtcctcaacaatggtagttgctgaagttaatgcaacacctgaaatgaacgatgcatcgactactgcaaagcctcagtccgttgatgcttccagtactgctaagcccaaaaccagtgatggttgggcccacgtgagcccctatatgactgatgttggagttgataatagtgcaagaatgacagatgctggtgttggccctgatagtccactgccgcaaaagcccgtcgaagaagatttgtgcgacgaaggcaatgctgagatgaaaaatcaaacaaagtcaaaggaagcggtcgctaaaatcttcgaggtttaccccatccttgcagaactaaatattcaccctattgcttccaacggccggcagcttactaagtattatattgggatggatgctaaggtgtacagtattaaactgagaaaatatgtactagttccgagcattgattggtctgagacgtatgaccatattggtgaggtattaattaatgatgtcagattcctcgcatacgtcaatgagaaggagcgacgtaatgagatgggtaaagaggacaaaaatagcccataccaggtttggcaaaatattggctcaaaaagaaaaagaatcaatgcctcagaaggagattattcaaaccgctctaagcagagagttgacgacagttttgtgttcgatactggaacatccacaagatccgatcaaatggacagcaagctcaaattattttggacaattagcaaaaatagggaagtccttgaatctaacggattgatgaagaagattgtaccaattcttaatggttccgcaaaatcttctcctattgacaaaaatggctatgtttggatcaatggcattagcattagcgtttacgggaaagatagcgatcgtgtgaagcaagcaatcactcagaaagtgaactggataatgacattccaatctttcattaatatgataaaagccatgggcctcgagttagaactagttggtagcaatgaaaccaaacacataaatgattttaccccagctaatggtgaagctcagcatgggttaatgagtggtattgatgaagacatggacccaagcctatcaaacgctgataacgacgccaagaatatcttaactgattactacagccagttgcacgctaatagtattgatattccatttcggctacaaccaatcgtgaacatcaacggtgttgttaagtcccatccatcatactactttggacagccatcggggtctagacccctaaatattttaaatcgtgaaaacaaagcacacaagcaggtgagtggtgtagcttggaaggggctaatgaagaatatcatgtggatggatacgcattcgtccctacttaacggggttgaggacttggaccgctatcttaatgaggttgaataccccttcccatcgagcgatgaagaagcagctaagatacttgaagaaaaggagcttgataagaaaatacgtaaaaacctggatgctaatcttgaaatattgaatgaggctattctaaagtctgtacacgatattagacagcaaattgttgaagagtatgaatacgatgacagcttgcaaaagcttcatgatgagtcagaagcagcttttcagacatacggtgaggctcagaaacgctatgaagaagcaaaagaggctgttagagggaataactcaaaagcagcgagatcggtgttgaaggcagctacatcagctatgaaggcgacaaaatcgatatatcaaacgaaggctaagcgatacgccgaggcaagcgagatgtccggcagtggcgttaaacgaaagcttcaaggtcgaggattgcgcggtccaggtgttgccccgctggaaggtgtagttcgccgaggccgtacctacaatctcaatgagatccaaggattagcaacgccgtcagcctacacatacaagccgatcggaagcaagtatattcgtatccccgaccttgatgttaaaaagctcgtgatcgttcagccgaatcggcgtaaatgtggtcctaagtgggaaatcagtgatagcctccaagccatgatcaaggcacttgtctataagaaccgtgtcgatcaatccgcttacgataagctcagcgttgaagataagaaactgttgaaggaggttctatcgattacttatttccaatacagcttccacaataagttagaggatcctctagatacgcttagggctgaatacgataagctaaaaggagagctacaactcggaaatgacaaccccagtatcatcaagcagctcacgtctctcacggtggatatgtacagcaatcgactgattgatgataaagagttcaaagatattatcacccgtttattatgaaaccatgttcttcttcaactcgcgcattatatccagttccagaggcagctatggtgacaatagcgacctcaacgtcgctgagttgaaagctatcatgaagaacctcatcattcatgatcgtccccagaagacccaagccgctatgggggctactgacctcgacaagtcgaccaagaaggtggaggcatctacccaaacggatggcggccgagtctgggcttaccagccaaaaaaaaagtcaaagtctgtgaagacatttgctctatagagcagagcggatatacttagatgtctacgtctgttttcttctcgcgatagagtctgactttttatctccgatatcgatagccatgacagcattcttgccactatgtacgttgtacattgggatataagcattattccctatcgaaaccactccagcgtgcatcgttattgaaccgatgccttggccagtttcagggttagtcaggttctttttgatcgttttacttggtccgcagcccatgatactctattacaacgaagtactcaagatctgctctatatttatcggtgcgaaattatccctgagccaataccatatataaccctctcgtggaattcgacaattcgatcacattgtagttgatcagtatcaacgacattagcgttagtagtctgaggacaagcggtcttcgccacgaactgagtttgacagataccattctatattgactcagacataatcgctctcaactcattgagttcagctttgagattattgatttgaccttgctgttcttggatagatttacacagtaccgaggttaaactggcgagatcgattccccatggattcactggaaacccatccggattaagctcatcgtttggtccgatatctactgcttctggtatgaccttatacagctcctgcgcgatatagccaacatggacagtctgctcttgaaccatcctgaactttctaggtctcattctcataaggcttgccaaaccatagggacagtctacaatgtccgccttcaacctctcatcgcttgcattggtatagcttcctccacgcaccgggacataggctgtccacgcgtaattagcatcgcattttcccaacctgatagctcctacggttgaatcagtaccaatcgctgggtagtcagtctgagaccaattgaatcgatacctagcaaatccatcgccgcctccctttacgtgcatgaaattattcacccatacctctccgcctgagtgaatggttgcttttggcgaccacgtactcataccaactcccagtcttcctgagctgtttagataagcttgagttgtgtttccaaccatgaaccttagcgggtcgctcgtagtggtgcctactacttcctcccgcgacatcgttgtatacctgaatttcaaattcgattggagtagtagcatcgttggctatatgcattgcgcgttgccaagacccgcttagtaaattcgcgctcgaaactatatccattattgcagtactggtagctgatccaaagcgaatgtatcctgcttgagtgattctcatacgttcagtcattggtgataatgcattagctcctgaccgtgtactgattgcaaaatcagtcattaaatattgaagactcgtagcggttctagtacaatatagattaacgctaggggtgtacgttgtcatatcactagtaccttcaatcgtgaacgataatccggcctgagcgccaaccgtattgctttgattacgaatcatgagattaaaatcagaggcacgcgttgttgatgtaaatgatgtcccggccgcaatctgacattgggtagaagtagtggatatcagattggttgacgttagagatgagatacctgatgagatgctactattagagtctagcacaagagcctttgatgcttctgcagttcctgctccggtggtaagatctagatagttcagctcaacggtagatgctgtgcatccagcaagcgtgttcagctccgcacctgtagcattgagagtatctcccctgagttgaagcgtagtaggattgatattcaaggtcgttgcattcatagtttgagtatctgacttactaatcgtatcacatgtgatcgtaggcgatgacattaaagtcgaagctataaagtttcgtgatatggttagatcgcgaatgcctgagtgatctttcgtactattgagaaccacaacgctactggctgaagcgcccccttcgataacattgagaaagtaagcatgattgaaatttatccaagaactgactccatcccaaaatttcagattcggaatgaataaaccggttccccagcgctaagggttagattgctaagcgtacctcgactagtaatattaggctgagcagcggtttgtagcgttcctgttatcgacgtcgctgtgagcgagctcagggttcctaggctggtaatgttgggctgagcagctgttgttagcgtacccgatacattacccgagcaatttacagcggttagagtacctaacgatgttatattaggctgagccgctgtctgcagcgtgccagtaatcgatgttgccgtcaaactactaatagtagcaatttcacctgatgcaccaagtaccacagctttgttgatagcggtagtacctggagtaatatcagttacatacgttggtacctgaaacggaagcaccattaacagttaggctactacagcttagtgctccaagaccactgatgttcccaccacttccagggacaagcgctacaccaggtgatgctacgccttgagagacacgccaagcgatagtcatacttgttcagataaagagtctgagcatagtcatacgttagaaacccgctggcatccaattggagaaagaatgccggattataaatcggcgatgtgaatatcgggctaggataagaaacctgaactcatctttgcttgatcctatatagtttagacgataatcatgagcggtattccagatttcggagcttcaatccctaaaaaattcaaaagcgcctctatgggtgatattccagcacttgacatcaaagcgctgtttagaatggtggttctggggccatcgttctcagggaagaacaacttatgtatgttcatcctcaagcattctcctcacgtatttgctcatctaacgatcattgctcttaatcctcaccaggagttatatgagtatcttcgtgataagcttgatggctttatcacattcgccgaccctgactcgcctccgcgtgttgaacgggtacgtcatacaccaattaattccaataagcctgagctcgtcatcatcgatgactacagcaacgataagcttcttcagaagaatttgttctcacattacttcactagagggtgtcacttcaagctatcaaccatcttcttgagccacagctacttcgcaacggacaagatgatcagattgaactcagagtacgtagcgatcctgaaagctaattctaagcgagacctccagatggttgtgaaagattttgatatcaagggagtagatgagcgttcaatcgtatattattacaacaaagccacggagcgaaagggccaaatgctcttcattgattcggtcaagggtaagatcaggtataacttcgatagaccgattcgtatcgaggactaattccaatttatctaacaaaaatatgcctacaacatataatcaatatgtccagctttatcaaacccgacagcaccaatctggtacaagatggaaccaattcaacctggaaatactcctttcccggatcggcggctgacttccgcgatgtagtatgtgccattcaatcgatttcgatgtataacagcgagtataacattgattcaatgcaatttcagaacacaacgttcaaaatcgaagtacctaccgctgcaattacatccacaatcagtgtatccctccctgatggtattattcgtatgacgatatcaaccgaagcattcagactgctcttgtcaatactggggcgtatctaatcgatccgtcggggaataaggtattctatatcaaaatgagtgctaacagtgtctattacgcttgtcagcttgatttctctcctacgcctacaactctaccaactaccggtggaacatggaccagacctacctccggtttatactcctctggtggtcctggattgccgactactactcgcgttcctcgtctgatcatcgataatgctgaattcggtaaagtagttggtctcacagcgggtacatacccctccacatcagctactgttgcaagtgctcagctatcgaacatcattcctcagattcacccgaccagttcctacatcgttcgttgcgatctgatcaaaaccgaatacgtggcttttggtgatattgtcagtgcttttgatagaggtgataccgctattggaaaggtcatttcatacaaaccgagccagtatgcgtggatgaactgtcataatggcgctcgagctagtattacactcagtatctataaccacaatgataaaaaaatgattttcagagatacgtcggtatccatcatgcttctgattcgtccaaaaaaataagacatccagagtatttttttagggcggctacaacgtaaacgaaccaccagtcttacgacgtgccctgagcgcagccatcttagccttcatctctggcgagcccttcgctggacgtttctttgctacgcctacaccatagcggcgacgaacctcctttcgcacagatctgattagatcctcatgttccggcttggtagcttttgatagtaggaacttctctccagcatcgaccgcgttggtgatgacccccttgcgcttcgtgtatgcaagagcattctttgcagacttctttacgtcagcctttgatacgcgccctccttccttgtcgctatcggaatcataaataccaatgccggttagggacttgattgcagctctggctggaacagcagccgttggctgaccagcataactagctaaagcaggaaccgccgcaccaacggctctggatagtagacctgaatccttagcaaatttgtatgcagacttgatccctccccatacgttggaccagatagagcctccttgagcctttttgtagcccttcttcacttcgtgcttggtaatgtcgagtctgacaccgcgtccagctttacgagccttgagcgccttttcaaacgaagcagggtggagatggatgactgaaccactaccctttagttcgcttgaggtgaggctgagcttaccagtcttgaaagctttggtaagcttccgcgcaggaatatcactggagattgttaattcgcgatacatgattactatatacgttgaattaaatttattccagaattgtcaaatttagatctttcattgttttgaatacatttggcttacggtattgcttcgaatatagccataggacacagaatggtccacagtagtctccatatgttcctcggtattgcttggtgttgtatcgatcgataccatacttctttggtggtccttcccccatactatcgaagaattcaccattatgaaccgccgtccagtgtcctacctcaagattaggagggcgaagtagaatcagaaatgaccctttcttggggagatgggattttatctcatttgattcgaatatattatcgagttgaacgttcattttctcagcgagttcgatgagatcatgatctgaggtgattggcttgatgaggtgcgacatagtatttaattttatcaaactatattaggatccatatagattcaacgatgagcgaaactcaactatccgatcagtacttgtaccagagctcgcttaagagcgacccggagatcaaggtatcttcgagcaagcgtgtaccgcacgttattgacctaaatcagggttcgtaccagaatggtgtcatcactatcgatgttacggctcagcttaacggttccgagggcttcgcaagccttcgtgatgcctacattatgcttccctacaaggtctcaatgaagaatggtggcactgctcaaactgccgctgccaatcgtctatgcgctactctaaaatgcggaaattggaacgttattgatagtctgagtctggaactaaacggaaagactatcgtctctatggctgactacaagctcttttggaacaacgttcgtgctcagactggctacagccctcagtacgttgaaaagcacggagctgaatcgttcttgtaccctgacgctgctcagtcggtatcatacagttctggatccgcatctaccagtggtgatggatattcaaacaccatggtattctcgtcttcctttgctgtctcggctcctcctggtggtgcaactattcctaatgatggtttcgttaagcgccttctatcgaatcctcctacggctggcgctgacttctccagctcgtggccgtcggtaggtggtgctgctgcatcgactaccatttctaaccagacctcgcgtggagctttcgtagctggtggtactgctgctaacgcaatcatgggaacgtggaactacatgcttaaaattaaactcaccgatctgtatcctatcttccgtgagcttgacttaatggctaaccctcaaattcgcctgcgtttccatgtgaatcagggaacgtctgtagtcgcggtagatgcttcaaagggtatgtcgctaacctctcctactctatcgtctggtgatagttatccggtcatgattgccgcttctgctaccggtaatccgatgaatggtgtgcttgccgcatctgctggttttagtgttgcttggggagcggttgtaaatgctcttgaacctaccatcgatggtacatacatgccttttactactgctcgtttgtatgtccctttcgttcatcttgagaaccctcaagctattatctctaagccggttaaaaaggttcgctacaatgattgctacgcacagtggttttaccagcgtgctggtattggtaagtcctcgactcaactaaatgcttcttttgtttacagctatcggcaagtgttaaaaacgcgaaatatgttgtgtttttaccattcgcggaacagacaaacaactgtgcttctgctactgttcagcagttccagagcccgttcgacagctctccatacacgcttcagcccgggtcttcgattcgcaactctaacgttcgtattggctcgactcaggtgttcgatatcagtcatgactatgatttccaccactttaccaacgaaattgctaagatttcagcgattaacggagatctaacccctgagctcgtaaatggtctacttgactatcagacgtggtcgctcacaaaccgcatgcttattgccgatgtcactcgcctgactgagcgcgatgtacctcaggctattcagatccaaggtacgaacgccggatgccaaggtgtgaatatgctgatcctcgtaataagcgaacaggaactaacgtttgatagactaaccggagaggttctagacttcactacagcgtaagtaaaaatagagatattttttagttcagctccttgagtagctttggacacttgtcaatcacgaattgactttttcttagccaatcgagatagcctggatccaatttactgatctgctgtaaagatttgcctcgatacttacccccacgtcatcatataggagttatcgttatttaggaatcttgagtgaagaaagattttcatttcctcgctaatgttgagactgggttggttgtgaatccaacgacagtatccaggatcattcttgaatacatcctcaatggattgagctttgtattttccgaaagatagttcgatcgtcatgttcttaccctcgcatgtgcgatcctgcacgactacagggtcgcgcgtctggtcgctggctaacggacgcctcctcgagctctgaggtggttgagaggtcgtgttggtaaaacggacgactatccacaaagatcgttctagcaccgttctcggaggtaaattacggtaagaaattatgaaaataaaaaactgccggtgtaatgttctattggttttatcaatatagtttgaacgagcggtcccgaaacgccctaagatccaaaagacgtggctctcgctataaagtgggcgtcgtcaaatcaacgtctattagatctgaccggttcaggttctaaagctaccctcatatcgaaaagacgtggctctcgctctcatctggtcgagaggggtcgtcgttgaaatcgctgctgtcccgaaagaaggtttcaggaatgttctcggtggtaaattacggtaaggaacaaaactgccggcgtaatgttccatgacccactactcccaacctggcgtgccatagcacattgtcagtgacctgcttggtgttgccgaccgcttgagcagcttgagcttgttccaactgattcacgtgccacgcgaacagtttgccactgcgaaaaatcaccccgacgacctctccgtccacgatgtgcgtagcgcgatctcgttcaaactgcacccttactccacgtgctgtcaatgccgggaccgataccaactttctgtccagctgaggcacatacaagacgtccgtcagcttgaccacccgaccactccggaggacaaaacgcacagatcctcttacttttgcgggtagctgctgcccgttcgcgaccgcgatgctgattggcgacttcaactcttgatactccacgaagtccgccagctcgtccgtcatgtgacagctcgcaccgctgtcgagcagccacatcgttgcacgtagttgggcgctgctcgtcgccgaaaatacaaactcatttccggccttgtcgttcttcaactccaggcagttctcgggcttgtgtccaaactggttgcagctgaagcagctcccgcgaaactcattcttgctcggccgacgtccacgaccgccggtactacgaccaccaccacgcgaaccgcttccgcgtccacgtccacggccaccacgaccaccacgctcgcgagtcgacgccttaaacgccttctccttctcctcgcgtttcttgatcacttcgaattcacgacgcagcatctcctttgcgtccagcagcgtaaccttgtcgtgggcctcaatgatgcgaaccattgcatcgtactcagggggcaaacttccgagcaaaatgaccaacttttcgtcctcgggcatcgtctcgccgacagcagccaatcgtgcgcacagctcgtcgaagcgtacgatgtgcttcatcagatcctctcctgcgcccagcgcaaaatcatgcagtttcttccgcagttgaacccggttgtgaagcgtctgcttcacgaagaaagcacgcagagtctcccacgcctcaagcgcggatgccgcgtcccggatcatggattggtacgtcggacttagcatcttcgccactaccgccagcgccttcatgtcggcggccttccactcctccgtctcgcggggcgctgcgtcttctggcttcatagcggcacttggagacccttcctcgccaacgccatgcgggcgttaaactcccacatgaagtagttatcgtcggtgagtatctcgttcgggttggaagcgtttgggctcataacctttaacttggacttgtcaattgcagcgcagaatggaaagtgcttgatcgaattacgagtttccttgtccacgtgtcctacacagaacgaacttaccaacatcttctagaatgtcctcgacgcttccatgaccaacactctggaacgcactgtaagttgcctttctccgtactcgtagacaggaccagcaaatccttaacatttagtagcttaggcaacagaacagtcattagttattagattattagaactataaacagtcacgaaggaaagccactaccactatcgagttcacatcgttgattgttatgagagtctcaaatgcctctacctgaatattttgttattcttctcagttcgcattacgcgcggccttggcagccttttctgccatcttatcttgtagccattccaatatgcgagaaggtactgatactcctttttgtggttcgcaagtctttggagagcttccaccctgtccgccttatccgcattgtacaaaccgctgaacaaggttttcatacctgccttgctgtcgagcgcatcatcgagcttcttcacgtcgatgaggtcatccacctttgctgcattaaaggtcctctcttcgtccccttcgaaggccctcaggaaccgccgagtcatgtcgatagtctccaccgagtcggacggcaccctctccgagagcgcgttggtagctgatgcagcaccgcttttcgcgagtagggcgaccgcagtgaccaggaagtcgtagcacacgcgcatggtagactgaggcttggaggattggagagtattgcttgctaggaggaaaattgcggaatgaacaggattttaaagcacaaaccgtgcatgaagagcagagccggtgaatataaataattatctctatctgaaattgattcatttagacagctcatgtctgcgacaaaaccccagcggagagctgctatccccggtggatccctgatgatgctgggctgtcgatgtgtgatgtactgtatctcgcctgagtggaatatgatgagaaaagattaaaagctagagtaaaagggatgacgaccgtgtatgatacaaaaacggatgggcgccttgtgcaaatcaatcacttgtgtcgagcattcgtaagacagtttgacgacaaatcaaatctagtgatttgattggcgaatagtacgacttgccaattctgttggcactgccaggcgcagaggctctgctaggaagacccgcgttcctcttcgctactctttttgatgcatttcgttgcacttcgtatcctgactaatatcgggcgccgcatagtagtggtagtaatgattggcggttcgatagaactgtgcggaggagcgctgcgacaccacggcgagcttagatcgtttaggtttcctagtactacagtagcaagccgagcaaactggtaagcgccttcagccgggctgatcaattacattagctttggcatttttcatgtattcccgagaagtttcgccgctcatttgactcttagaggccctcacgtcgtttgcgacaccaccaacagcttgcctacacgtggccgcgggtgaggtcggaggtgtccactaccgacgtaggtggagctgcggcagtgtgcgcctccgggagtaaggcagccaagcaaaccgcaacaaatacaaataccaagactggctgacgctgccttgttgctactacaaaacagttcatttcatggctttggtaagatcccataatgtattgaatgtctactccctcgcgtcctccgacaacgcctcggtgcggagcatgtgtgcgcgctcatcgtgcattgtttcgctcggaggcgtcctcagaggacacgacagggttcgtgggccgcactaccggaggaagaggggctctattaggttatgcattaactagaattcacgataaagccctgaacgttttgtttgtcaagctgggctaatggttcgggtgcatttatttcttaaccattctcaaacaagcgtgtacattgtagtcggcagtagggccgcactaccgactacatgttcgtgtttgtgagcgccttatttcgtcggctcaactgtaggtggtacgagcaattcaaaaacggcaaagcggttgtcctcgggttcctacatgctcaatggaggaacgcacgcaactacactaccctctttcgtgcagaaagttttggccaatcgcatggtgcaaattgttgtccgacatactgtcttacgttttgacggacaaaatacgatgtagccactggtataataaaaccaagatgtagcctaaatgagttgattgcaaatcgtaagacgctttgtcttacggtaggctctctggggctaagtatcgtcttacgaaagagcatgaatcaaaggatgaatgcctcgtgtgcgtccggtacaggcaaactgcgctcgctgatacgaagcctttggaatgacattatgcttgccccttgtgtaagacttcattttgacccgcaggggttccaccgaacccattatcacgatggtggcttccctagaaggctttcacctgcggaatcgtgtaggacgtaattatcgacctgaacgctagaaccagctagaggaaaaggttatcagctcccctgagaaggaacgggtgtattagaagaaaaaaacgcgatgccattcgctcgcattccgtgtgtccgaaggcccttcatcgctacgcgtccaataaaatgcatgtaaaaacactaagcaagtcatccctcttcatagaaaacacacggaagtccaccgtttgaaggttcgtactaggacttcagccttttcacactagattttaatccgcacccgaatataatcacaactcggcttgcgtaatacacctcctcagccagagctcacgccatttctcggtcaaacgtacatacatgggattacagttgtgattatattcgggtgcggattaaaatctagagtgaaaaggctgaagtcctagtacgaaccttcaaacggtgggcttccgtgtgttttctatgaagagggatgacttgcttagtgtttttacatgcattttattggacgcgtagcgatgaagggccttcggacacacggaatgcgagcgaatggcatcgcgtttttttcttctaatacacccgttccttctcaggggagctgataaccttttcctctagctggttctagcgttcaggtcgataattacgtcctacacgattccgcaggtgaaagccttctagggaagccaccatcgtgataaatgggttcggtggaacccctgcgggtcaaaatgaagtcttacacaaggggcaagcataatgtcatcccaaaggcttcgtatcagcgagcgcagtttgcctgtactggacgcacacgaggcattcatcctttgattgatttgcacaaggcacccatccgtttttgtatcatacacggtcgtcatcccttttactctagcttttaatcttttctcatcatattccactcaggcgagatacagtacatcacacatcgacagcccagcatcatcagggatccaccggggatagcagctctccgctggggttttgtcgcagacatgagctgtctaaatgaatcaatttcagatagagataattatttatattcaccggctctgctcttcatgcacggtttgtgctttaaaatcctgttcattccgcaattttcctcctagcaagcaatactctccaatcctccaagcctcagtctaccatgcgcgtgtgctacgacttcctggtcactgcggtcgccctactcgcgaaaagcggtgctgcatcagctaccaacgcgctctcggagagggtgccgtccgactcggtggagactatcgacatgactcggcggttcctgagggtcttcgaaggggacgaagagaggacctttaatgcagcaaaggtggatgacctcatcgacgtgaagaagctcgatgatgcgctcgacagcaaggcaggtatgaaaaccttgttcagcggtttgtacaatgcggataaggcggacagggtggaagctctccaaagacttgcgaaccacaaaaaggagtatcagtaccttctcgcatattggaatggctacaagataagatggcagaaaaggctgccaaggccgcgcgtaatgcgaactgagaagaataacaaaatattcaggtagaggcatttgagactctcataacaatcaacgatgtgaactcgatagtggtagtggctttccttcgtgactgtttatagttctaataatctaataactaatgactgttctgttgcctaagctactaaatgttaaggatttgctggtcctgtctacgagtacggagaaaggcaacttacagtgcgttccagagtgttggtcatggaagcgtcgaggacattctagaagatgttggtaagttcgctctgtgtaggacacgtggacaaggaaactcgtaattcgatcaagcactttccattctgcgctgcaattgacaagtccaagttaaactaaatacctcctaatacaatacccatccgaatagtaaacactggaacaaggtataatatcgtctatactactactgtaataccggtgtactattcggaagaatccgctaccggtagtgtaaaacccaatttgggtttttcggcttgggccgcgaccataaaagaggctttccgcgaccaatcaaagcgtttggtcgcagcgagagacgcgaccaaacatgctgcttggtcgccgacaccaaaactgaagcattgcaagctgatcacccaagcttcccgcgcttgatctcgctagtcttctcgggtgacgcgggagctgtcacgcaaccagagccgctctcctcgccctcggcatcgagcccaccgtgctgtccccgccgtcttggcaacttggtgtcgtaaagctcccattccccaattgacaccgtcggcgacaagctcgttgcagcttcaacatcccgaccatccagccacttcaactcggagtcatgggagccgagctcaagatcgcgtacgagggcggtgaggccgagcgcgccgcgcgccacttcgtggacaattcggcctcggccgtggcctacaagcgcgtcgaggacgcatgcgccgccgtcaacgacgaggaggtggacttcgccgtgctgcccatcgagtcgtcctcgctcggcagcatccacgcccactacgacctgctgctcaagtacggtctgcacgtcgtgggcgagtacgaccttcagcagcagcagccagaggccgccccggtgccgcaggacgcatcgtcgacgccgtcgtcatcgtacacgcggttcctgctgctgtccaagaaggaggacctggcgctggacgacaagaagacggcaggcgtcgacttcaagacgtcgctggtcttcggcttcaaggacagctcggccaggggcatgctcacccgcgcactcgccgtcttctcgcagcgcgacctggacctgaccaagatcgagagccgcccatgggatggccaggccccgcagcagcacggagagacggccgtcgacacccgcaggtacaagtacctcttctacgtagacgtgcagggccacctcacggatgccaacatggcggcggccatgcggcggctcagcgagatctgcgctttcgtgcgcgtgctgggctcgtatgcgacggcgcagagcgcggatgccctgacggcggtcgagctagcgcgcaagaccggccgccgcgagaccggcaccaacatcaccatggccgacaagtacccgctgaaccccatgttccaaaaggtgacggtcgccaagaccgtgctgatccacggccagaccaagcaaatggaggccgagggcaagcaggtctggtcgctctgcgtgggtgagcccgactacaacccgcacgagcgcgtgttggctgcaggtgccaaggccatgagcgacggcaacatcaagtacgcgcacatgaaggggctgttggagctgcgcggcctcatctcgacgtacctggagaaggcaaaggggctcaagtacgacccagccacggaggtgctcgtgtcgaacggtgcgcagcagtcagtgtaccaggcgctctacacggtgtgccgtcccggccagaaggtcatcatccccacgccctactggctcaactacccagagatcgtcaagctcgtgtacgcggagcccattccgctgcgcacgacactcgaggagaactacctgatcaacccgcaggagctggagaggacgctgacggcgcacccggacgccaaggccatcatcctgtgcaacccgagcaacccggccggcacgctgcacagccccgagcacctcgagcggatcgccgccgtgctgcgcaagccgcagttccgccacgtcgtggtcgtctcggacgagatctacgagcagctgctgtaccaggacgagggcgagtccgagcgcaagcacgtgagcttcgcgacgctgccgggcatgtacgagcgcacgctgctggtgaacggcttctccaaggcgcacgccatgaccggtctgcgggtgggctacctcgccgcaccaaagtactacatcgacccgtgcacgctgttgcaggcgcagctcacgtcgtgcccgaacacggtgggccaggtggctgccgtggaggcgctgaagtacgagctcgagtgcatggagaagggggagcgccgcatcaccgaggtcatgaagaacctcgacaccaagcgccggtacatcgtcaagcgcctaagcgccatgcccaacgtgcgcttcgcgtacccgacgtcggccttctacgtgttcctggacctgtcgagctacttcaagggcaagaaggcgttcatggctgacaagagcgtggcgctcgcaagcgtcgacgacttctgcgcgcacctgctgcaacactcgcacgtggccgtggtgccgggctccgagttcggcgacgagttcggcatgcgcatctcgtacgcgagctcgatggaggcgatcgcgcacgcgatggacggcatggagaacttgctcaagtccttgatctttgagtaggtctagtagctgttagtgtacaatgtaaggtttcgacgtaatgtatcagactgcaagtatcactcgcgacagcacgctggtcagtgtcttcgttcctgtatttgcagtgtcgcgggttttcaagttcaccgggtttgaaggaactatgcagtagtattcgagtcaaaccagcctccatctacacgaatcggtaagggtagattgcaagctggaatacatgacgtcgtaacggcgggaacggtggtgaagctgcgcatggcttcaagtcgacatttgtagctatttgctcgatcgaatcttggggtagcagcaatacatcatcttattcatagacttagattctagtactcgacgggattgatttggccttatttagccacacaactctccgagtatgatgacagaacttcttggagtttgaagggctcacgactgattggagtcatcgaaagcccgatgcggcaatgcactcgtagaatccttggtgggctagtaccggtagccagcattgcgctattactactggcacgtatcgtcacaatgtccatccaagctgcaaacgaagtcccggggttctctttggggtatcgggccccagcggacccagatacagacaagaccgtcgtcgagatcgtccaagctcgcagctacgccatcgagacgcacaaagtcaccacctcggatcgatacgtgctcaccatgtaccgacttccgaagacttacgccgagagccaatccggctctgctgctgctcccaacaagcccgcagtccacctgcaacacggtctgctggacagcagcttcacgttcatctccaacttccgcaacaaaagtctcgcttacgtgttggccgacgccggcttcgacgtctggctcggcaacaaccgcggcacaacctggtctcgctcgcacctggactacaccaccgacgacgacgagttctgggatttcacttggaggacatgggtctctacgacctgccggcgtttgtgaaccacatactggccaccactggtcgctcgacggtgagctacgtggggcattcggagggcaccacacaagcgttcgtgggcttctccgagaaccaggaaatcgcagagaaggttgactactttgctgcactggcaccagtggcttggacgggtcacactaccgccgagtactttgtggcgttagcgaaagaaaatatggatgagatgttcctcaacctcggcttcaccagcttcctaccgcacaacgaccttcttacagtgcttctgtcggacgtcgtttgcaccaacgtggccgagatctgcaactcggcaatcagtctcatcgccggaccatcggacaacttgaacgccacgcgcattcccgtctacctctcgcagacccccgcaggcacctctgtcaaaaacatggcccactacgctcaaggcatccgtgacgacaccttcgcgtcgtacgactacggctgcagctgcgtgcgtctcctggggatcaacctctgctcgtcgctcatttgcaagaacaaggctgtgtacggcagcttcgacccgcccgcctacccagtcggcaagatggtctacccgcgcacgggcttctacattggcgccaccgacacgttcgcgacctccaccgacatcgcgcagatccggtccgcactacccagcggcaccatcgtgcacgagaagaccgtcgcagccttctcgcacctggacttcacctgggctcagaacgccaacgagctcgtgtaccaggacctgctgtcacagctcaagaaatacgccggcaaggcgtacaagtaactcggttagtgctagcaagttgaagttggtcaaaatgtcgaaaacggttcatccatgtccataatcgattttgacacctgcgtttgtgtgtgtgtgtcaaaaacatgccacgcaaggcgtcgagcgaaagccgccgcgcgcaggtcgccgaggcgctggcgctggtcctggccgcggggtgggccacgcacctcgtccagaaggaggaggaggcaggtgaacagcttcagactgaacagcggctgctgcaggccaccaccatgtcccacgcgctgttcgtcctgcatatcctgggcttgtccgccgtcctgcagtcgattttcaggccacagacgctgtccaaggagctgcgccgagattccaggtccggagtttgagtttttgacagcgatcgtccttgagggcaatagactcagtagcacaatggtaatgcagacaggaacgcgacgccggactggtggtgggctgcgtgctgccgcctctggtgctgttgagtcgcctgctggcggagatctaccaggacggagctttctcgagcgtcacgttcttctacgcgtggaccagcatctccgtcggcgtgagtgcgctgctcaaggtcgcggtcttcgggtccgtcacgtcgctcagcgtcaacgtcctcgtggatggggtgctgctaccgacagcgttcgggcttctgactcctgtggaggcggagtggaggttcctgctggcgacggggggacgagtctttgtggcgacggtgctggctgcggacctcaagctgctgcctcggtcgttcacggtgggcgaagctctactggtggcgcagggcgtcggcttgtgcgcctacgacctcgtgctgtccaccgtcaattgggtgcgtggttagatctattgctggctgttgttgactgagggaggggattgctgacgaggtttgagctttgctggtatgtgcggtgtatgcagctgaacgaggttgacgtgatcgacctgccgccgaatgtcctccacccgtggctgctctttgacatggaccgaccggactacgttttggctcttcaagttggaatgttggggtcgctgctggtgtgtatcgcgctgatcccgttgctgcgtttgtatggagcgccgtcacccaccgctgttgcccagccattgcccttaagaggtagtgtggggtttgtgcttacggccgtggcggtcgtgggcggagtcgtgtatccgtggagctgcttcttgctgcagacgtggaatccgttcggctggctgttcgacttcctctccgaatcgcgcagcccgccctcgtccttgccaccgcgatttatgttaatggggtactgggcgacgtgcttggtcgtgctcgtcccattgttcgcgttgatcaccgaccgcttcgcattgcggaacattgtggcgcgaaagctgttccacctgctggtggtggtcatgctgggtccggcgtctctttttgacgtacccatgctgtcactgagctacggtgtggcgctcagcgtcttcttcctcgtggagtgtgtacgagcgctggcgctgccgccatttggccgatccatcgccgagttcatgcggacgttcatcgatcaccgcgaggccggtcgcatcatcttgacccactcgtatctgttgcttggctgcgcgctgccgctgtggctcgcgccctcttttagcggaccctctccgctcgtagtgaatactggcgttctggcgttaggcgtgggagacgcaatgggggccgtggtgggatcgactttgggccgacgcaaagtgttcggtggcaagatgctagaagggtctgcagcggtgttcttctcgatgctgatcgcctcgattccgcttcacgactatcacacgcgagcttatgtcgatggggaatacgtccaagtacgtcgaattgttggctttcaacgtgctctgaaagtgttttcatcttttaattaatgattggttgtgcaatgtgtatccgcgtagctggcgctactcaccgttgctgtctttttgacgagtgtgctagaagcagcaacggcgcagattgacaacttggtgctcccgctcttcttttacaccgcgtgcaacctggtgagttgtcatcgagagtaacgggaagcggattaccggtagaagccaagtgtacgtactcaatgtaccctgctagatttcttggatcgaatgagacacgactcgaacttgttactctttcggttcgtgcagcatgatggtccactacacttactcgaaagtcagcgcgttgagcgcgaactcgagcccatccatcgcgtgcaccatcgtgtccatcggacccgcgtacgaattcggagtccatacggctcacccatgtcggatcccggggccacagccacgctcgtcgtacggatcaagtactcgaagaaatcgttgacattgtcgagaacctcgctcttaccggtcgtgtacgccttcttgccttcgaagtacagcgccaagtccatgaagacgtagaaggccgctgtcgggtacgcgaagcgcatgctggggatcgctcggaggcgcttcacgatgtactggcgtttcagatcaagatcgtgaaggtcctcggcgatacgaacctcgccccgctcgatcgtttccagctccagcttcatggcttcgatggccatgatctgacccacgctgttggcgcatgacgtggtctgaccctgcatgagttggcagggctcaatgaagtgtttggggccggccatgtagccaacgcgcagaccagtcattgcgaacgccttggagaagccgttgatgaggattgtacgctcgtgcatgcccggaagcgcggcaaagctgacgtgcttgcgctcagccgctccctcatcctggaaggccagttgctcgtagatttcatccgagataacaacgacgtgttggaactgcggcttgcggaggactgcagcgatcttctccaggtgttcggggctgtgaagcgtgccggccggattgctggggttacacaggatcatcatcttcgtcttggtgttggcggtcagagtcttctcgagttccgtcgggttgatgaggtagtcctcctccagtttgttgcgcagtcgaacgaggccagccttcacctgcgtgatgcagccctcgtagttgccccagtacggcgaaggcagcaagatcttgtcacgtgggcggcagattgcgagcatcgcgttgtagagggcttgctgggcaccgctacagatctggatttcggtatcggggtcatacttgacgcctttcgtgcgctgaaggtactcgacaatgatcttgaagttcggatacatggccagtaactcaatacacctcaccgttattaaaaaaaatactcgacaatgatctcacgcagtccagccatgccacgcatatcgcagtacttggtttggccctgctgaagcgccctgatgccggcgtccatcgcaactttcgggggcgggaagtcaggttcgccaacacacagcgagtgcacaagcttgcccgaggcctccatttccttcgttaccccaaagattgcaatggttttggcgatagtcgtgttatcaaacacgggactcaacggatacttctgcgccatggtcagctcttgcggaacagcatctggagcaccattcgtcgtctccaccgcgccgctcgagtagcacccaagtacgcaaacatacgagcacatcgccctcaacgccgcaatcgcctccacagccttcgcatcgctctggcgagctttcaagtccgcgtagaagatgaactcggccttgccggcgctcgggtgcgcgctgctccacggtcggctctcgatcttgctcaggtcgatctcgcgagatgcgaacagaccaagagcacggtgcagctggccgtgcgcgttgcccgacgcaaaggcgaaggcgagcgacgttttgcactggtccgtcttgggcgagggctccaccggcgtcttggccaccatccagaatctgtgtgcgtcggaggttttggccgagtgttcgtactcgcccacgacggccaggttgtatttgatcaggaggtcgtaggattcgtagcagctgccgcaggtggcggagtcgacgggcaggacggcaaactgtgcgtcgtccttcttgaccgcgacgacggcgtcttcgagcgtggcgtagctgatggccttggattgatcgacagtgctgagcatttgagccgcagcgtccttggcaccggggaatgctgcatcttcatggtaggccactcgcgttgatggtccgacagccataatgggtaaaggaaagcttgcagtcgattagtgtgtgtttcgttcgcaattttaatggagtttcgcgttcgaaattgaaattaattcggtttaatttgcaaacgaaatgtacgggattcggcgcgacgctattcaggtctacaaagggccaacaagaccgatgaagctggtcatactttcaattgcaagcaaagtgtactcacgacaacgtgaatttattaacttagcatccaagttgtactcaaaaacttactcgccaaacatcaaagtcgtactcaaaacttactcgccctggtagtcgaaggtatcatgaaggaagtagtccaggttttcttgggccaatctgattgccttggctttttctgggtccttctgctgttcgtcgtccgattcatcatcgtcatcgcttaagctaagacttcatgctcgtaattctcctccccatctgagtcgtgagcttcgtagtgaatcctgttctcctcttcgtcgtcgtcaccttcactggttactgccgtctgtagaattgcggggttgaagataactcttggaagcggcttctccagtcgatcccagtacatggaaatcagcatgttgattttgtccaggccaaggttaactcgtcgatctgagtagacgaacttgtgagcactccagttcctttccgaagccgctgacgatgtcggcatcgtgaacacccggcgcgctatccgagacaggactggatatgagtcgcgctcgtcgccccaccactctagaggtgcagaacgggactcaatacggcgctgcttgggcgtccaatcccgcatcaaattccagaatacgccggcttcgtgatatgcttgatcaacttcctccggtgtgtaacccagtctcttcgccatcttgcggatctgcttcttgctattctttcgatctttgccaacgaaaccattggggtcctgagccgggtccaagaagaatgcaatgcacatggcatctgtgtgcactttgttccatctcgcttcgatttgcacaagtatagcttttgccgtactgaccaaaaacgttggatcgcagtagataggctgcttgaggaggtcacgaaacgcccagtacgccattgaaatgtagcagtggtcggattccagtagctgaagcttcttgatgatcggctccagcagctgaattacttgttcacccttcatccagaagtcttcatctcgcaccagattgtcaacgttttggaagacggccgctttcaattcctgcttcttctttcgttgggcctcggcctcttgggccttcttcgtcttcttcttggagcgcgtacttcgtcgccttgatgtcgttgtctgagctggtgttggctgggttcgcagattctttttcccgctgtacgaagccataaattcatcgtcgtcgaacacgcgggttatagcctctctgttccggatcacgttcacgaggcaatggtacgaggagtaccagcgggtaccaacagggatggtgaacgagcgaccgtgcacttcagctgcgttgggtcaagccatatcgtccttctcgatcttaaaccaggcaagtagctgctggcgtcccatgaagtacgctgtgatcgcctcagcgccagccgctacccgcttgatctcgtccatttttgccacatcttgcaaaagcaaattgagaacatgcgcagcacagccattgcacagcaacccccgcgtgctttcaagaattccccacgccttttccatattaggcgcattgtccgtcgtgacactcgacaccttgctttcgccaacaatcgcgtccaatttgtccaccttcgcgccgataagcctcgcaatatattatccagtctgggagtcgactccagtcgcaatggtctcgaggtgcaagggatccatatttgggcctgacgccagaagattgatcagtttttcccgtctgggattcgaccatccgtcgagctggaacgcgaagaatttctgcttcatcaggatagcaactttcttctcgaagtgttcctttgcggtctgctttaggagcgggtcgccaacgtccgttggcgatggaacttttgacgcttgaagtgcaagtaccatgcgccaaggtcaagaccaaacgctggaaagagcccaaatccacggatcgaaacgccgacgcggactcgtaaatgtagtcggcaaccagtttgttgacgagggcttgagtcacgatgtatgacatcaacggttgtccatcagtgtcttcggcgtccgtttgcagcatctccacatctccactgttcagactcctttgccgcgccgcctcttccgcacgctcttcagaagcgcgcttcctcttcttcttctccacaagcgagtatccatcacacttcgtcaagtggctttcgagcttgtgtggcttcgggttggcaatctgagcagaacagcgctggcacttcacgcttccatcagcacctggttcttcgaaaagcttccagacctcgccttttggtcgccctcctggcattgctgctccacgaatccaacatgttagtgcacgccgcggccagcgccttcgccacttcaccctcaccgtcgctcttccttgatctgcgcaagagtcttgatggtccgtgcgcccttggagtgtccccactgggtgcacggagtgcgcgcagagtgcggaatgaagttgaagcgcgagtgcgcactcgccctcggagtgaatgcggcgagcaaaatgttaaaatgtagtctaaatatagagaaataattctaaaaaatggctactcgagttttgtcgacgaaatgagggcaatcgttcgcgaaacacgcgttctaaacggtttcgattgctaaactcgaactaaacgaaacgaaactaaacacacactacagtcgataactagtaggtctccaggcgaatccgagaatgagctataggaccatcgaagagatggcggtccgtctgattacggtatcttttccgtgttggagggagatgggcatacttcgtcatgcgcctgtgattggctagcatgacggatggctacattcgatagtcgacctccaaacgacatgttgagatgagcatgagcttcaagggtgcatgtactaggggtcgctacagtattgtactctagacgcggaagcctgatgcgtgcagcaggtcgatgcgcttctccgccagcgccttctggatggggaacacattggtcaagccgcgctcgcgggcctcgtcgagggcctgctgggccaccaccttgaagcgctcgttctcgtactccaacgcacgccgagtctcatgatcatcctgcagtctggaagctcgctcgttcgatatcgtcttgcgccttgcatccgcttgctgcttctgctccaccgcgaggcgcagatcttccagacgctgcccctgctcctcctgcttgacctgcatctcgatccgtctaccgaactgctcccactgaatgaccgactcgagggcttcttcggctgcttgctccttttcacgctgcttgcactcgagctggtggcgccggctacgcgcaatcgcttccttctcgacagcacggcggtcggcgcgctctttgagctccttgtcctccttcgcgcgcacttccttgctctggttctgcagacgctcctcgttcttttgctccagtttcaccagattattcgtggccaggtcgatcatgcgctgcttgcgggcctgcgcgttctctttcttctgccgctggaggtccatacgcttggcgtcgcgtagctgtttcttgcgctcttcctcctcgcgcttcacgtcctcaagacgctctttctccttcagcatctcccggtgagcgcgcaatctttgatttgctagctgcgcgtcctcgctcgcctgcttcagacgcagtttccgctgacgctctctctccatctcgtccaggtattcctgctccgcttgctgcttcatccgctcgccgtccattttttcctgtgtcgcgttcagaacatcgagttagaggtatgccgattgtgtaagtagataacgaaaaatgagaacacaacttacctctcgaagctcactgatgtagcgctgcttgtactcctcgagctgtcccttttggatggctgctagtctcgcgttttcttcctggcgcttctttcttagacgtcgctcttcttcctcgccctcgagaaccttggcaagtacctgccggtcgtacagataatttgtcaaatcgtcttgatctttgagcatttgcttctcctccagctgaagcgtgcggtgctgtcatggccagagtaagggttagcccaagtgtacaagtgctggctcaagaagtcaaacatagcactcacatgaaccacatcggccagaagttgcttactccgcagagttttcatccggtcggtctgttcatagaggagccgattggcacgctcgatctgcttggtctgcgcctcgcgctgaagccgcatctcctcctcgtcgatcttcttgcgctcctcctccaggcgttcctctttgtcctttttccagcgatccttcttcttgcgcatggcctcgagcgtgttcggccacgtggccgtgcgttgctcggatttgagcttgatagcctgacgtctcgcctcgcggtcgctttgcactgggggcgacacactcgccctcatgcgttccagctcatcggcactcaaagtcgtacggtgcggcatatctacagcgctgggtagctgccgagccaacacgctgcgcttggaactcaattcctccacggaatacggtccgtttgcctgcttcgccacctccgcgaaaatagatgcaaagccaagcgagcatcaagctacccgcaactaaaattggccataagcttgcacatgtaaccagtatttccaccactacatatttacatgagagttgcattccgcacgaggggacacgcaagcactgtaggcgaatctacatgcacaagtgcaatagtctcatggagcattttgcaccaactagcgccatgttgagcgctttcagcggcgacagaacgcgttgaagtccgctgaagccacatgaacgccaccgggtcagctttgcagcacgtagtggggtgagtgcattgtactcaggtagtcttgtgctagtcatctaatcggtcggtttggtttcgactagcgtactgcggcctttcacacgcgcgtctgagccaatcacagggcgcgaaggcgcatgacgtcggtacccatcttcaacgggtatccgcgcaggaaaatcatggtttcctttcaactcactcctcatttcgcttcaacaccagcaagcccagctaactcgaccaggactccagaatggcagtgggaacgtcgacgcgagtggcctaccatgaagatgcagcattccccggtgccaaggacgctgcggctcaaatgctcagcactgtcgatcaatccaaggccatcagctacgccacgctcgaagacgccgtcgtcgcggtcaagaaggacgacgcacagtttgccgtcctgcccgtcgactccgccacctgcggcagctgctacgaatcctgcgacctcctgatcaaatacaacctggccgtcgtgggcgagtacgaacactcggccaaaacctccgacgcacacagattctggatggtggccaagacgccggtggagccctcgcccaagacggaccagtgcaaaacgtcgctcgccttcgcctttgcgtcgggcaacgcgcacggccagctgcaccgtgctcttggtctgttcgcatctcgcgagatcgacctgagcaagatcgagagccgaccgtggagcagcgcgcacccgagcgccggcaaggccgagttcatcttctacgcggacttgaaagctcgccagagcgatgcgaaggctgtggaggcgattgcggcgttgagggcgatgtgctcgtatgtttgcgtacttgggtgctactcgagcggcgcggtggagacgacgaatggtgctccagatgctgttccgcaagagctgaccatggcgcagaagtatccgttgagtcccgtgtttgacaccaccaaggtggccaagacgcttgcggtgtttggagtgactaagcaaatggaagcggaaggcaagtctgtctactcactgtgtgttggcgaacctgacttccagcccccgaagcgagtgctagaagctggtatcagagccattcaagaaggccagaccaagtactgtgatatgcgcggcatggcggagctgcgcgagatcatcgccaagtatctgcaacgagccaagggtgtgacctacgcccccactgagattcaagtctgcggtggtgcccagcaggccatctacaacatggttcttgcgattctgcgcccaggcgacaaggtattgctaccgtctccgtactggggaagctacgagggcattcttgcgcaggttaagacccaacttgtgcagctgcgaaacacactggaagacgaatacttgattaaccccgtgaatctggaggaggcgttgacggcaaaccccgagacccgaatcctcattctctgtaacccgagcaacccggctgggacgcttcacagccccgaacaactggagaagatcgctgctgttctccgcaagccccagttccggcatgttgtcgtgatttccgatgaaatctacgaacagatcgtctatcaggacgaaggtgtccccaagcgcgtctgcaagagcttcgctacaatcccggacatgtacgagcgcacgatcctgatcaacggcttctccaaggcgtacgcaatgaccggcttgcgaattggctacatggccggccccaagcacttcatcgagccctgctacctcatgcagggacaattgacgtcctgcgctaacagtgttggccaggtcatggctatcgaagccatgcagatggagctggaggccatcgaacggggcgagcttcgcatcgccgaggacctgcacggcctggatctgaagcgccagtacatcgccaagcgcctccgcgccatgccgaacgtgcgcttcgcgtacccgacgtcatctttctacgtgttcgtggatctcggactgcactttgagggcaaaactgccttcactgccgacaagagcgaggtcctgcacaacgtcgacgacttctgcgactacctcatccgtaagcatggtgttgcggtgggtccaggctcagatatgggtgaaccgcatgggctgcgcatttcgtacgctggttccatgaacacgatggttcactcgatggatggtatggaacacgcgctcaactcgctgacgtttgagtaatgggcaaagctgagcatccaacacgaactataggaaaccatcaccatgtaatagcgcgctaaatacataacttcaaagcagtgtcatgacagtcgatcacctgcaatgcgcgagtgcattcaatgaagtttctgcggaaacgtcaggcgtagtgaaccctgacgaaatatgcagccaaattatgtctgccatttgcttaattactgttatcagctcatgaaggctacgaagaagctctagcgctgtcgtagaccgtcacgagacgacgctctgcaacgcagtaacttgctgctcagccagacggataccctccttccgaagataattcacaatggagctaacccgcatcacttgcaactaaatccaacaaaatataacgtgatcagcccaggtggaacaaacacagcaagaatatagatatatacgcaccctctcaaggaagatgatgcgcttcagctccttggaaatgttgaaaatctccgctttgttgatatcgtcaatgatgtcgacctcgctcttctcgatagaatcgagcagaggttcgagctggtcacgtagcaacttgagcatcaaagtgaatgattcgtttcgtgcgaagtcttcccagcgttggagctcgcttgggtgaacaacgtaaggcttgcctacttcctgctttgtccgcaaaagtgcctcccgccgcttgtactccaggtaacttttgttgaactgggatccgaccagggtaagtggcatggcagtgtaacaggctccaaaaatcatggcgacgacggccaccagcttccccgagctcgtcacaggctccatgtcaccgtagccaacagtggccagtgtcacgatgacgaaccaaaaggccgagaagaagtcgtcaaaacttgaaatttcacccttgaaattcacgagaaagcgtttaccgggtaacgcgccctcaagctctgacgggaaggtcatgttgtggtcgccgacaatacactcttgaccgtagaaacactccgtacccttttcgagctcgaacatgatgaaagacaggatcgtggtcacgaccataagcatgaaataagggatcgtaagtcgtgctgatgtcttggaaatcgactcccaaagcaccttcgtgactgggatgctctgctggatcttgaaaatgcgtgacaggcgcagcagacgcagaaatgtcagaaagtcctgtgatgccggagtgatcacgtatatgggcgtcacgccggtgaataaccgtcgcccttcaaatacgaaaaatgggatgaacgacgccatctcgatgaataccagcggattcttgaagtacgagcggtagtcttcgcatacgaacagagcagccgcgaattcaaacatgtacgtgagcgtgaaaatgtactccatcgccacgtatccattgccaaactcaaagaaagtcacgtgcaggttgtcacactcccactttttgcaaacgctcagctttcgatcacgcttgacaaggtacggatccggtcggaacggcaacacgaggtcaagttggtctcggtaggacgacccactgttgttcaatgcactcaacagcaccttatccgatccatcacacgaaagtctgtcatcgaccgtgctactgccgaagttgcctggatacccgtaacacgtcgaatcggtgagcttttcggcagcagtgcagccaaagcgcagctcaacactcgggtcatcgacagtaaagcaacccgggtcgttgccaccggcacgaatgtccaggacgttctcacagtagcgctgaacctttcgctcgcacaagtaggtttcctctccgtatgtctgcaggtccggcatggtttggaacacgacgataatcatactgaaaatgaggcagaacttcacccaacgagaaataacgcgtcccagcagagacgaatccggctcaaggatcgtcgttcgtgcccattctcgccatgtcggcggcgcagcgacctcctgcgactcggccactatcatatcacgcaccattaccgccagctcttcgcacttgagaaagcagagctcgacggtttgcttcaagtcgtccgtaatatctcgaagttgatgcaggttgaactcatgagccgttgcctcagtgactagagcctgtgtgatcagcgacgcctcgcccgtaagcgctgccaagcgcaggtatagcttgttgggcgcgttatacttgaccagaatttcatgtttctggtgggcacggttgtctcctgtggcagcagcgaggtcaatattcaccggagtggcgacgtgtgtgccagcctgaagctgctgaaacttcttgacgctctctgcgtgctgcttccaggcgcggtcgaactctgttccgataatggcgagaggcatggacaagaagagcgtgccggacatgataatcatgacggcgaagcagcggctggccacgttgcctttcgtgggcgtgatgtctccgtagccgatggtggccaccgtgaccaccacaaagtaccccgtcgtcagcaagtcggagaagccaggcttgttgcggtcgtagctggggtccaccatgtacatgacgaccgagaagaagagaacaatttccgtgaagaagataagcgccacggaaataggagcgacactggcgcggatggctcgcagcaagatgtacgttcccgagtgatttcgggcgagcttgaaaatgcgcagcagtcgacagagccgcatgatgacgaagctcttctccttgccgaagatcaggtcggtgtagaacggtacgatagcggccacatcgaaccagttgaagaagtcgcgcaggaacggcttcaatcgccgttccgtcaggtactcgtgctcgtgccagagcgacggccagatgatgagacgaatgagaagctccggcgtgaaaatgacggtgaacaccaggtctgcgtcgtagtagccgttctcgctgggtagtttcgggtactcgggctccgagctgtggtggttcggcccgtccagcgtctgcaggaacaggatgaagcagctcgtgaaggccgcgcacgcgatgaagaagctgtagagcgacgccccgcgtgacgagttggggtccaccatgaagacgaagatcttctcgaagcggccgagcgtcgtcgcgtgcttggtcgcacccacccccgcgcctttgatcatggactcggcatagaacgccgagttgacgagcgcatccagcgactcctccgccgtgctgaacgtcggcgagatcgccgcgtacaaaggcatttcgacagcggcagcggcaacgaactaacggggggcactccgtcggatgcaaatggtctcgaggaagcgcatgggtccgctaaagatggcgttgcagctgagaaaccgccagcgaccgggtgtttcatgctgcaacgtcggacacttgcacacgaacgacatttgcacgtgcatcatgactcgttagcaatacagcgagctacggacacgctgggcattgctacacctaaggagttgagagcacacaccgcgcactggaccagtacagtggctgaggttgccttgaactggcgggcggaaatcccacttggtgatggagaccgcatcaccggcagcgagcaatcgttctgcttggttgaacaagcagcgtttggccatcgagccctgtcgtcagcgggagatttgaggaaggagctcgtgtttggtcgttgcggttgctgccgcgctttgaggcgaaaatcgagctgtgacgtggcaatttgcgccctgcggttaacaccgcgctcgactgtcacggattgaagctcaaggcattgaagctccacagcgcgcgaattgcagcagcagcaaggtctccgcagcacgagggcgtgtcagcgcgcaatgattgccccacatctgccccgtgctagagacgcgcgacaagtacgtgttcatcgtctatacattttccaagtctaaatttcgccgggaataccacccccgggggttctatttaattgctgaatcgattggcaaaaacaataattagaagtaattgctggtaaagtctccgatgtgacctgtacaagactttgggcaaattctgcgtggagtgtaggtactgtagctgtaatggactagatttaatctgaacgaagaattgtgaggcttgcacataagtcagggtcgatgcaagacgtgtattgtcataattatatctcgggaaattgcgcacgtccagcagttcatcgatgttaattcactgaagaaactgcagtgctcacgcagctccatacatgcaaacttgagtgccggcactactatagcttggatacgcagcaagttcagatccccatccagcgcgatattcatcttccctcaccagagcattgacaatttcaccaactaatatgtgacggtaacattctccaccacaaaagagctgtgcatgtattcgaacgtctatcaagattgcctgatccatactacatgtagccacaacctgcgactgcctgcctattggagttggaggtgccactcgtaagatgcgaatcaaacaacaaattgatctgcaacccaataccatgttttccaacaataattattgtcctccgtccccgtcaaatttgttttaccgatcctatcctagtctgcaatccacaagctcattccgcactttgcgcccatcagccggcagccgcagcaagcgaagcgaaggacctcacttcctctcttcctctgcgccgcccacccgcaccaggaccaacactctctcaacatcacagccacaccatgaagggtgaggtgaaggtggcgtaccagggcatgcccggcgcgtactcagagaaggcgacgcggcagctgctgggctcgtcggccaacgtcgtggccgtgggctacccgtccttcgacgaggcgttcctggccgtgcagcgcgaggacgcggacttcggcgtgctgcccatcgagaactcgctgggcggcagcatccacgccaactacgacctgctgctcaagttcgggctgcacatcgtgggcgagtacgacctgcgcgtggagcactcgctgctggcgctgccgggcgtgcagaagagcgacatcaagacggtcatcagccacccgcaggcgctcgcgcagtgcgcgcacaccatctcgtccatgggcgccaagccgcgcgccgagtacgacacggccggcagcgccaagatgctggccgacaaccagtggcgcgacacggccgccgtggccagcgacctggccgccgagtactacggactgcaggtgctgcagcgcaacgtcgaggacgacgccggcaacttcacgcgcttcctgctgctgagcaagaaggaggacctgggcctcgacgccaaggccggcacggagttcaagacgtcgctcgtcttctccttcgtcgacagcaacgagaagggccagctctacaaggcgctgtccgccttctcgctgcgcgacatcgacatgtccaagatcgagtcgaggccctggggccacacggccgagcagcagtaccaggactcggtcgcggcttcggtcggcgacgacttctcgctctcatccgagagcgcgcgcaggaagtacagctacttgttctacgtggacctcatcggccaccagacggacgagaacatcatcaacgcgctccgccatctgcgtgagttctgcaagttcgtgcgcgtgctcggctcgtacccgaccaagggcaaactgctgggcgaggtgcgcaagacgcttgaggccgtgggcgcgtaccaggccaacccggtcacggcctcgcccgccgtcgcaccgcaggagcacaagcccgtgcgcctcaacatcggcatctacggctttggcaacttcggccagttcttggccaagaccatggccaaggcacacgacgtgcgcgccacctcgcgtacggactactcgagtgtggccgcgcagctcggatgcaagtactactcgtcggagacccagctggagcagttctttgatgggttggatgtcctggtgctcggtgtgagcattctgtcgttcgaaggcgtgctgagcaagatccccaagcacctcctcgagaacctcgtgatcgtcgacgtgctgtccgtgaagacgcaccccaagcagatcatgctcaagagtctgcccgagagcgcgagcatcttgtgcacgcaccccatgttcggccccgagagtggcaagtactcgtggagaggtctgcccatgatgtacgaaaaggtgcgcatcacctccggcgagcacaaccacgtcatggacaacttcctgcgcatcttcgagacggaaatgtgccgcatgcttgagatgacgtgcgagtcccacgacgagtatgcggccagcagccagttcttgacacacttgacgggccgtatcctcagcgtgcagggcgtcaagaacacgccgattgacacgcgcggtttcaagaacctcgtccgtcttgtcgaagacacctgcaaggacagcttcgacctgttccagggtctctacaagttcaaccccaactccgagcagcagattcagaagttccgcgagtctctgaatgaagtcacccaaaagctcggtaacaagcctgccactactaccacttcgttccgtgacgctgccccgctgacggagaagtacccgcagaacccgctgctgggcaagatcgccgcgtccaagacggtggtgatccacggcatggcgaagcagctggaggccgagggcaagcaggtgtggtcgctgtgcgtgggcgagcctgacttcgcccccgcggagcgcgtgctgaaggctggcatgtccgctatggagcagggcaaggtgaagtacacggacgtgaagggcacggcggagctgcgcacgctgatctcgcagtacctggagacgtgcaagggtctgaagtacgacccgctgacggagatcctggtgtcgaacggcgcgaagcagacggtgtaccaggctctgctgacgatcaccaagcctggtgagcaggtgctgatccctgcgccgtactgggtgagctacccggagatggtgaagctgaccggcggcgagcccgtgattctccagacgaagctgtcggagaactacctgatcgacccggtggagctggagaaggccctggtggccaacccgcgcgtgaagtcgctgatgctgtgcaacccgagcaaccctgctggcacggtgcactcgccggcgcagctggagagcatcgctgcggttctgcgcaagcctcagttccgtcacatcctggtgatcgccgatgagatctacgagcagctggtgtaccaggacgagggcgaggagaaacgcgagcaccagagcttcgcgacgctgccgggcatgtacgagcgcacgctgacggtgaacggcttttcgaagtcgcacgcgatgccgggtctgcgcatcggctacctggcggcgccgaagtacttcacgcaggtgtgcacgaagctgcagggccagctgacgtcgtgcgcgaactcggtgggtcaggctgccgccgtggaggcgatgaagttcgaaatggagtgtgtgtcgcagaacaaggagcgcatgacggagacgctggcgatcatggacgagaagcgcaagtacatcgtgaagcgtctgcaggcgatcccgcagctggagttcgcgtacccgacgtcggcgttctacgtgttcctggacctggcttcgtacttcgagggcaagcagggcgtgacggcggacaagagcgaggtggtgaaggacgcggatgacttctgcgagtacctgcttcgccactaccacgtggctctggtgcccggctcggccttcggcgtgaagaacggtctgcgcatttcgtacgcgtgctcgatggagacgattcagcacgctctggacggcctggagcagtcgctgggcggactgacgttcaccccggtggctggcggagctgttaccccggccatggctgctcctgctgtgagtggaggcgttgcgatcacccgggctctgttccgcgaggatgctcccctgacggagaagtacccgcagaacccgctgctgggcaagatcgccgcgtccaagacggtggtgatccacggcatggcgaagcagctggaggccgagggcaagcaggtgtggtcgctgtgcgtgggcgagcctgacttcgcccccgcggagcgcgtgctgaaggctggcatgtccgctatggagcagggcaaggtgaagtacacggacgtgaagggcacggcggagctgcgcacgctgatctcgcagtacctggagacgtgcaagggtctgaagtacgacccgctgacggagatcctggtgtcgaacggcgcgaagcagacggtgtaccaggctctgctgacgatcaccaagcctggtgagcaggtgctgatccctgcgccgtactgggtgagctacccggagatggtgaagctgaccggcggcgagcccgtgattctccagacgaagctgtcggagaactacctgatcgacccggtggagctggagaaggccctggtggccaacccgcgcgtgaagtcgctgatgctgtgcaacccgagcaaccctgctggcacggtgcactcgccggcgcagctggagagcatcgctgcggttctgcgcaagcctcagttccgtcacatcctggtgatcgccgatgagatctacgagcagctggtgtaccaggacgagggcgaggagaaacgcgagcaccagagcttcgcgacgctgccgggcatgtacgagcgcacgctgacggtgaacggcttttcgaagtcgcacgcgatgccgggtctgcgcatcggctacctggcggcgccgaagtacttcacgcaggtgtgcacgaagctgcagggccagctgacgtcgtgcgcgaactcggtgggtcaggctgccgccgtggaggcgatgaagttcgaaatggagtgtgtgtcgcagaacaaggagcgcatgacggagacgctggcgatcatggacgagaagcgcaagtacatcgtgaagcgtctgcaggcgatcccgcagctggagttcgcgtacccgacgtcggcgttctacgtgttcctggacctggcttcgtacttcgagggcaagcagggcgtgacggcggacaagagcgaggtggtgaaggacgcggatgacttctgcgagtacctgcttcgccactaccacgtggctctggtgcccggctcggccttcggcgtgaagaacggtctgcgcatttcgtacgcgtgctcgatggagacgattcagcacgctctggacggcctggagcagtcgctgggcggtcttacctttgagtaaatgccatttgcacttgttgggggcgaagtcccccctataatcatgagactccgttttatggagtttttacgtctcttatatacactccgctttacgttttacattaattctgcgaatgggttagggtcataatttagaatcgctcacacggggaccaaaaaatgaaaaaaatacatcggttaaacaacatttggatgattatcggaaggtggtatcggcacgcattttttttgtgagctgaaccgacgtcactatctttagatgccataaaaccagagggtcgaagttatggtaagaagtctgcggcccttcgggatcgcttgaccagcgcacaacagagtccaagcatcaacaagcagagcctcaaggaagcgccaacgctacgccaagtagcaagcagctttgcatgctgaggaccgggtactgtcgagcagcaacttctctaaattacattgaaggctatgcgcggatgacgagctggacgatgagctggggtgtacgagccggagtccgtgtcggtgctttttggtagcaacaatggctctcttatggcccgttcgagctcgcctgctacttcgctttaaataaatcagacagctccaagtccttcctgcacgctaaaggcgccgattatttgctcctttctagtctgcgttaattcattcattgcgttgctcatgaaaagatgttcgactaagcaaatgcattagcccactcaattacagttctgttgggtcgatctcgggcgtcacagctctgctttgataccctacatgcatgtgtgatggtacgatatcgggctcaactacattattttgagctagttatcgttcattatatatatttccttattgcgcttaacgtgcatgaggttatctaccgacgcgtgcagactaaaagctttgaacagccgtgcatgtcatagtcgcggcagcaacattggccattgcggctgggtgtagatgacatctggaggaagaatttcaacatggatcgcgaaaggttactggaataattcgctcgtattttcactctgaaaatgaacacaccacaaaattgaaacatcgaaagttaaccccttattcacttttcgttgtgccagtgtgcacattctgctattacacttacctaagtaagtaaaatacaagtgttctggcattcgaaccacaggtcaggtgtatcagtctaccgttaataacaacgtatgaatggtacttatgttgtttgcaaaatagccagcaaatcggggagcgtgaaaggggaaataaagcgctagaatttgcaagcggctttgtgctcaaattcctcaagtggggacgtcgtccaaaactctgtggtcagcatagttttgggggtcgacccctaaagcaacatgagcgcagcgaccgtgatgctccgctagtaggtagtaaagttgacgcatgtaatttgtgtaattgaatctctttactatggatcttaagagttcacaggggccttgaacttaagtgtcttacggatgatgtcgattatgaatcccacaacacataggccagaagtcatcatcgctcgatcgaccatccaactaatttgtgcagcagtgcatactattagtactatgcagcaaagtctatagcaacatcatgtattgtgctttgcacgaactttggcatgcgattaccgaattacctatgtgatcaccttctatatgttatgccatgcaccctaattgaccaatcacaggcgtttcgggaagattggtgtgcactgcccttttatagtgactcacttgatatttgtattgaaacgcgttttttatgcatttgcatggctagccagggcaccgaaatgtcgactctatagagttcgctgaagtgtatggcataacataggtaattcggtaagggctctaaaccaacgagcaaatccttcccggtgatcatatctcgcagcctaaccccaacactttttgtcctaggatttaggaccaaactcacttaagtacgccgtatttagcagggttttgtcctagaaccagcaaaaaggaccaaaagtgacttgggggttgtatgggaggaaataagaaccaggtaagtacgagggtgtcatgtataacaaagacaacaactgttcgagtagtgaaacggttgaagccctatattgaactcaagtcattttaaggaatttgtcctagaatccaggacaaaaaagaaatgtaacatgttattaatgacacctttcaactgtagcttttgccgttatggacaatggtggacactacgcataacaaaggattaaaagagggaatcaaaggctttctctccgtaccaataagatggcttatctttcaaaaacaacgccagcgtaagcttctaacttttggtccttgtttttgtccttgatttggcgggtgttggggctaactcttaagttaaagttaagctaatcaaccgccagtaccaagcacaacgcagagcacgaacggagcggtcgccactgcaagaataaatctgttgtagctgcaagaaaacaaactgataggtccccgatagaatggcgccaactccttgcataatagtaagcaccgatttcggcggggacgttttctttcgctctcttcgccgtggccttgcgcgttaaaccaagctcgaatctcagagcacggcatatagtagcagtagaaaatttctactagaaatgtttggatgtgcaggaaacgctgactttaaagctgcttgcagctcctcgatataaaaacagggatgttcttcaatattgtagacgtagtttagtacgatagatcgccaacgcatgtcaatcatcgactagaaagcaatcagacaaagcgagcgagtagaattagaatgtcagggccgtagtattgtcggatttactccaggcattggacgcctaccacaaatgcattaaacgaccaccttatctgcagcagatatgacgaggcatatgccggtcataaatctcaggaggcccagatatggtctcgataaactggacgccgcccaaacccaccctatcggtatgcggcctctgatttggcaactttagtggttttagctttgtttttgtatgagcttatccacatcgaccctcaacaagcaaccttctttacagattgagccgaccacaccttctacgagccctggggagagccgggctcctgggctcttgggtgaacccaaaaagtcgcgagctcgggctcctgggcttttgagttcaataggttaagtgaacggagccctccagaactgtgagacctcgttaagggctcatccctcacctgttaaatatctcgctgatgattggccgtcattgaagtatctccaggttctaacctgaaaaggcataggaaagagggcttctccttgaggggaaggaaggactatcggcgacgctggggtggcctcggagcggctgtacacatatgagcggcgcgagatcttctagtgtggtgatctttgagctcgatcttctagcgtggcgcatcgatcacgcgaagttgctcgccttaagtctaggtaaaattggccaatcagatattactatgaagagcccgtcatagatttgaagctaaatttggggagccctggaggggagccaatggggagcgatctcgtacttaccatgagggagcccgttttgtgcgacttttggctctcgtattagggggagcccacttttgaagttgacgctcgttgaaggtgtggagccgactgtataccttctgcacgctccccatgtcccactccgccgcctgacgcaccgaagtgatggcgttgtggagggtgcgtgcagaggctctctgtggtaggcgtccattcaacgaaagtgagcataactcaacgttaactcgttgtcttattgccgcttgcaaatactttgccctctaaaatagaccacgcctgtctcttaatatgagtggacacgagataggcgagggctgatttagctttatgctttgccgggggccgcttttaggcccagaaactcggtttggcccgtcgagaatggcttttctgcgtttccaagtcgtagaaaagcgccttggtcgagaaaacagagccccaagctcggatcttagaccgtactggcgagatatataaatcagacctaggtcttaattaagagctggctggattaaaatcgagattattaacgagataataagcatgcgttggccaaaatatctgcaaacggtaatagcagctattctatcttaaatcgacgagttagcctcctaactcaatgatgggctaatcaccatgatttgctaaaacaacggattacgtcgttgtttagacagaaagcatgcaaggcacaataatacgaagtgaatatatacggtggtatggggttcatgtggtcagtttgtcgttagttgcatttagctacagtttcaatctcgtttccttcaaatgccagcaacaaagatgcaaacgccagaagagataatttatagatggcgtctccgtcgctgatcaactgtggacgaatacatgcgaatgacgagccctcgctactctccaagttcatacgctcctggaaggggctgcaagtcagctactacggtggcatgtactccatccatcgactgcttgctctcgatgaatacacgcgaaagactccattgtatcgggctctgcttgtttctttcggcgcaccaacgcctgtagtggtgctggccttaatccaagagtcaatccctctacaagatccgggggcggggtggcgtgaaaactgcggcttctggattcgttcggcaatactcgcgttcgtgatttccctgatggccacagatcaaacgcgtttcctcatcgacggcgtggtcatctcttggtggcgactagttttgctgtcactatgcgcgtccggactgttcactgtcggtgctaccaccgttgcagctcactccatgttccccattccgttcttcgcactgacgatggccccgatgttctacccgctcctgattctatcgtatcgggttgtagtaggcggccagatttttcgccttattttggagcgtcgaggccagctcattcgctacgtcatgttcgtgtgcaccgaagttatgatagcggcagtatacgcggcctacgaagctctttatcgcctcgcaaaaggtttgagttaccaaattctagtgattcttcttctgccgatgatcaaggtcgcagcaaagaatgttgtattgcaatgcatgaaacacctggaagatatggtcccggaagctgtcatcttcacagtcgattttttcaacgccatctacctggcaacttgtatgcagagcgcgacgtcaactttcgctgttatcgccatctctatcactgacatatcacaaacgattgtcatgttgttcggcctgcacaagcgcaccactactattgtagcgcgactccgggataccgttggaaattctcagcaaaatgacgacctagtgaaagctctgtgtttgctgtgtcgtagtcccgaaaagtttgagatacaagtccgcgcaggcattcgagtgacgtcgtgctacccacatgctctatctgatgataacaaggttctgctggataaactggcgaccctttccagtaccgacagcactcgtgctactggaccttacagttctgctattcaattacaacacccctctacattcgagtgactcagattgctctgtcagagaaatcggattggacctactcatcaaattgtacctgaaccagctgcacaaagagcgtcatcagccaagcagctgggcttactccacgttgatgcgctcgcaagaagaaacaccgtacttggagaggcgctcgaggtgctgttctcgttagaatgtcttgtcgccacggcgtacttggaggccgcaatccctttctgttacagctgctacatcatggttatggtgttcctcccagccgcccagtatcacacagaaatggacggtatcacgagtgaaaatgtggggtccaaggttcgcgtcttgcatctttttggtctgctgcaagtgttttcatttgtggtgcttggctttttgataaagcgcaactgcggaatgcaggcatggtatcagctagcattcgttcacgagtcgcagatgtcgttaattcagggaaaacttgcagcttgggtgattgtcacgatgtgcttccgtgtggtgcatttcggtacgtggttactactacacgaattggggttgctttctaatatgaatcgtagcatctaagattccaacgttgcttgcatgctctgctggccccaggtgtcgacttcgcgtttcaattcgactagtaaactttttccacaaaggaaattctagtaaagtctgcctccaggttggacgcgaaatggatgggctcgaattcacgcttaactcgctggctttcgagtaagtgcatggtgcacaagtcgaaacgagccaagctcagtagtcttgagttatcgtcgagcgaaccaaggggtctattgagtgcgcccacttggcttctgatccgtttcgcgttactctcgatgacaactcaccagattgcacgcggtgtaaaagaagagcgggagcaccaagttgtcaatctgcgccgttgctgcctccagcacgctcgtcaagaagacagcaacggtgagtagcgccagctacgcggatacacagtgcacaaccaatcattaattaaaagatgaaaacactttcagagcacgttgaaagccaacaattcgacgtacctggacgtattccccatcgacataagctcgcgtgtgatagtcgtgaagcggaatcgaggcgatcagcatcgagaagaacaccgctgcagacccttctagcgtcttgccaccgaacactttgcgtcggcccaaagtcgatcccaccacggcccccattgcgtctcccacgcctaacgccagaacgccagtattcactacgagcggagagggtccgctaaaagagggcgcgagccacagcggcagcgcgcagccaagcaacagatacgagtgggtcaagatgatgcgaccggcctcgcggtgatcgatgaacgtccgcatgaactcggcgatggatcggccaaatggcggcagcgccagcgctcgtacacactccacgaggaagaagacgctgagcgccacaccgtagctcagtgacagcatgggtacgtcaaaaagagacgccggacccagcatgaccaccaccagcaggtggaacagctttcgcgccacaatgttccgcaatgcgaagcggtcggtgatcaacgcgaacaatgggacgagcacgaccaagcacgtcgcccagtaccccattaacataaatcgcggtggcaaggacgagggcgggctgcgcgattcggagaggaagtcgaacagccagccgaacggattccacgtctgcagcaagaagcagctccacggatacacgactccgcccacgaccgccacggccgtaagcacaaaccccacactacctcttaagggcaatggctgggcaacagcggtgggtgacggcgctccatacaaacgcagcaacgggatcagcgcgatacacaccagcagcgaccccaacattccaacttgaagagccaaaacgtagtccggtcggtccatgtcaaagagcagccacgggtggaggacattcggcggcaggtcgatcacgtcaaactcgttcagctgcatacaccgcacataccagcaaagctcaaacctcgtcagcaatcccctccctcagtcaacaacagccagcaatagatctaaccacgcacccaattgacggtggacagcacgaggtcgtaggcgcacaagccgacgccctgcgccaccagtagagcttcgcccaccgtgaacgaccgaggcagcagcttgaggtccgcagccagcaccgtcgccacaaagactcgtccccccgtcgccagcaggaacctccactccgcctccacaggagtcagaagcccgaacgctgtcggtagcagcaccccatccacgaggacgttgacgctgagcgacgtgacggacccgaagaccgcgaccttgagcagcgcactcacgccgacggagatgctggtccacgcgtagaagaacgtgacgctcgagaaaactccgtcctggtagatctccgccagcaggcgactcaacagcaccagaggcggcagcacgcagcccaccaccagtccggcgtcgcgttcctgtctgcattaccattgtgctactgagtctattgccctcaaggacgatcgctgtcaaaaactcaaactccggacctggaatctcggcgcagctccttggacagcgtctgtggcctgaaaatcgactgcaggacggcggacaagcccaggatatgcaggacgaacagcgcgtgggacatggtggtggcctgcagcagccgctgttcagtctgaagctgttcacctgcctcctcctccttctggacgaggtgcgtggcccaccccgcggccaggaccagcgccagcgcctcggcgacctgcgcgcggcggctttcgctcgacgccttgcgtggcatgtttttgacacacacacacaaacgcaggtgtcaaaatcgattatagacatggatgaaccgttttcgacattttgaccaacttcaacttgctagcactaaccgagttacttgtacgccttgccggcgtatttcttgagctgtgacagcaggtcctggtacacgagctcgttggcgttctgagcccaggtgaagtccaggtgcgagaaggctgcgacggtcttctcgtgcacgatggtgccgctgggtagtgcggaccggatctgcgcgatgtcggtggaggtcgcgaacgtgtcggtggcgccaatgtagaagcccgtgcgcgggtagaccatcttgccgactgggtaggcgggcgggtcgaagctgccgtacacagccttgttcttgcaaatgagcgacgagcagaggttgatccccaggagacgcacgcagctgcagccgtagtcgtacgacgcgaaggtgtcgtcacggatgccttgagcgtagtgggccatgtttttgacagaggtgcctgcgggggtctgcgagaggtagacgggaatgcgcgtggcgttcaggttgtccgatggtccggcgatgagactgattgccgagttgcagatctcggccacgttggtgcaaacgacgtccgacagaagcactgtaagaaggtcgttgtgcggtaggaagctggtgaagccgaggttgaggaaggtcttgtccaccttgagcttcgccaacgcgacaaaaaattcagccgtggcgtgacccgtccaagccactggtgccagtgcagcaaagtagtcaaccttctgtgcgatttcctggttctcggagaagcccacgaacgcttgtgtggtgccctccgaatgccccacgtagctcaccgtcgagcgaccagtggtgaccagcatgtgtttcacaaacgccggcaggtcgtagagacccatgtcctcccaagtgaaatcccagaactcgtcgtcgtcggtggtgtagtccaggtgcgagcgagaccaggttgtgccgcggttgttgccgagccagacgtcgaagccggcgtcggccaacacgtaggcgagactttggttgcggaagttggagacgaacgtgaagctgctgtccagcagaccgtgctgcaagtggactgcgggcttgttgggatcggcagcagagccggattggctctcggcgtaggtcttcggcagtcggtacatggtgagcacgtatcgatccgaggtggtgactttgtgcgtctcgatggcgtagccgcgagcttggacgatctcgacgacagacttgcccacatccgggtccaccgtagcctcctgcacttcggtttcagcgttggcggatgaggtcagggcgcctagaagaagcactaggcccacaactaagaaccttagcgcatagggtgtttggtgacgaccgtggctcatgagttatcggggtcacgatggcacttgtgttgcttgatgcaatttacagaatgcactgctgggaccttgctgctgttcgtgcgatagcgcatctgcgccggtacctggaaaaccccaggatgatgactggcgagtcgctaagcttcaattcgcacgtgaaaagcactgctttcaaaacagtacctcgacgcatgttggtgttgtggttgaagagccacgaaaacaaccaggtgaatgaatgacctgagcttgattacagttgcaccattccggacaacctttgggctgcgaaaactaggtcgattccgacgtgatgttagtcaaagtgcagcacagtacttcaaataccacccaccgtcacgctggtaccccatgtttgcctagtgagcacttctgacaactaagtttggccgatgcaggggttttaaaagtatcacgaagccatttatttcttggaggtgaatccaaacgggtcaggcagctcactgtacttgctagcaatgctaggtgacgagtcttcgttcgaaggcttgtcctgtacttttgctggagcttctactggcgcgctttgggagtcactgaggcgtacctgcagctcgtttgcagcaacagcgtcctcgccaatcatccgagcctcaatggcgtgccggagcagtccgagacggtaaaagctggcctcgcagtacaactcgcgcagctcctcgaccgattccggcagcgtgctgtctctcaagaacgcgacaatgagccgaaagacccaaaagtcccgatcgaagaagaacgattgatctgtgtcggggcgaagcttgggggctgtcgtgcagagctgcgccaagatcgagaagcggtctcgagtccacaccttcacggtggacttgaacagctaaaccacaaaaggagcaagcgtcagtcataccgtcgattaaaataccatgtgaggcgagatgcggctaatgagcaggtaggtaggtacctggccccccacgttgaagacaaccacactgtcttctggtagaaagctgaagtgcttgctcacgttcttctcaaacctagtcgaccaagagcagcaggtgatatgagaagtgaaaccaacaatctatatctccttgaagtgccacgtactcgttgcgtttggcatcgtactcgcgctgggcgtcctccacgctcacccactcggccaccaccttcttcttctcctccacgagctgtacacaaaccccgtcttcagctgcaatggccacatcctaccagctaatccagcgagcagcaaccttcttctccgcgctctcgatgagcgcccactcccgctccagctcgcgccgcaagcgctcgcgagacagcatggctgcaaccacttcaacttgcgcgtccgttcaacattccaccctctcactttcccctgcaccctcttcattttcccgttcctagtgataaaactgaatatcacacttccacaatgtggtgatagagatcagttttgacaggggaattccgattcgtacttaattaaggtgattacggtgcgaccccccctcgctgccctccagtcaagcgttcccagtcagtatcatcactagggacagccatggcgatctcgggcatgcgatggggcgatgaggaggacgacgtgctgccgcagcgcacggagagcgagccggactcgcagggcgtgcgtcagatcgtcgagtggaagctcaacgacgccggcgacaaggtcaaggtgaccaagaagatcaagaaggtgacggaggtcgagcgcgtgagcaagcgcgcgctggagcgcaagaagtgggccaagttcggcgacgcgctggacgacggcgacggaagcaacgtcacgtacatgtcgtacgaggaggtgaagctcgaggaccccaacgccgaccaggtgctgcccggcgagaagaaggaggaggagaacatcttcgccggcgtcaagaactcgtccatcgtcgtgtgtcgccactgtggcatggtgggcgaccactggacgctcaagtgtccgtacaaggacacgcccaaggaggagctggagcaggacatggccaagcgcgccgaggccggcgagagcgcggcccccgcgtcggctgcggctgcttcgggcgagcccgcggctcgtggctccgctctggacggcgccttcggctccagcaagtacgtgccgcctagcctgcgcggccgcgccggcggttccggtggtgacgtcggcggcggcgacaactcgcgcgacgacagcgccacgctgcgtgtcaccaacgtgtcgcccgacacgcgcgaggacgacctcaaggagctgttccgcgccttcggccccgtgtcgcgcgtgtacctggccaaggaccgcgagacgttccagtcgcgcggcttcgcattcgtcagcttcgtgtaccgcgaggacgccgagaaggccctgaacaagctgcagggctacggctacgaccacctgatcctcaagctggagtgggccaagccctccaacaagcccgccaacgaggacgccggcagcatgggcaccaccttccgctccggatacggcaaggcgctgccgcagaacgtggcgccccctccgcgcaagtaggcaggcagcggcgaggcatctttaatgaagggtggttgtctctgtctttacttacttaatcaaggttcatgtttgcatcaaagcacgagtctgtccgtcgacgagttgagttgagttgagctcagtcgatcccaatgctgcggccaaatcaacaatcaacaccggagctccgcttctacatgaaccttatcatccggtgctcggcggtacagtggcacttttgttattgatcatcaagtattatttctcagaacctattagactttcacaaagtatgtcccttgtttttaaataatatcgagtttacaagttcagaaagcacacttacagtagcttcaaaaaccgctcccaacattattctcagaagtcggctcgagtccccaagtatctctctctgcgcgttcatggcgaccgacgggttcccgggcggcctggcgtgggtggagcgcggctcggtgctcatccgccgcatgaactcggagcgcgtcgccgaggacccgcgcgtgcgccgcctgctgctgaagctgtcgctgcccccgtcgcccacggaggtgacggccatggaggcgatcgcggaggagaacgcggcggctgcggcggaggagaagggcgacgcagaggagaagcggccgtctcctccgcttcctccccctcccccgtcgctgctactggacgcccaggagagcttcgaggccatcgaggcggccacggacgctaacgacgtcaagcaggagagcgagaacacggcgtccaacacgtacaaggtgctgctctggacgtacaggctgcaggtctcgctgcagagcgcagtgcagtacgcgctgttcgccaagaccagcgaggacggctgcttcattcagatcgctccaaggtaagggaagaaaagagggggtacagtactggggacgggttttgacgacgattttctgcctgcgtgcagggtttattgcgtggcgccgccgcatatcacgacgttcagtcggttgttcggggcgtactcgtcggcgcgcaactggaacgcggcagtgaaggtgctggagcagttggactcgcagatgtccaagaggttcgaggacggagcgtgtgtgtttgactgcgggctgttcgatggcgtcaagaggatgcaccacaagccgctggtgtttgacgagttttgtggtaagttttgttattgatctggatagatatatagagagtattgggaaataaccgatacgtttttgcttggtagatggacgcatcgcttcgatctcgtactgccgcggaccgattccctcgatgcattccggtttcgtggttacgtcgacggttgcggcgtggctggacctcaagccgtccaatgtcgcaatcctgcttgccccgaacaatgagcagatgagtgtgtttgccacgtgctgcacgctctactgcaccgtcgtgtccagcttcccggagaacttcggaaacgagctgctgagcgcgtatttgcagcacattaagctggccgaaacgtggccagctaagctccagcggactttcagcgggaacgaccccaagaatgccgcctacacgggtgggttaccgcgaccccaggcacgatacattgcggactttggcaagctgttggagatgcgagacaaaaagttaatggactgcgccgacttgccagccctggaggagaagaagcataagctgacgggtattgcagtgaccccagcggcgcgaccgatttatatccgacagatcgatctattgtcgagtcctgagtgtgcagacgaagcaagcagctcaagcctcacggcgttgtcgcctctggctgagatctgccgaccttattttgtcattcagaacgagaaaggggtcctattctccagcatggtgaacggcgttcgaaacgtggatctgcatacagggatgcacatattccgggtgggaaggcagttccagaactgcagcgacttgcagctaaagatgtatcacctgccattcggtcgacagggggagctgatttttgagtgccgccttcacgccagcatcttgttggagctccaggttgtcgagggggaagcaggagttggagaaaatgatgtaggcattgtcacgttgcgcctcgacaagggtgactttgactgcatttcgtcgacattctcgctacctaagcagttcacggtccggattttgtattcgcacgacttcagcgcgttccccgccatggagtcgccacttcctgtcagacaaatggatgaaatcaactctgttggggattctgctgctgcggcagctgctgctcattcgaatggagatgcatcagcggctcatgccagtgcattcgcggatcagcaacggcgtgctagtacaaaggctatgcgatatgatggaccaaatgctgttacgtttctgttgggccaacctggaattcggacgccattcggagatctcgcactagagaaagttgatgtgattcggaaggcacacagaaaccgagtggatatctatctgctcttccacgtggatgcgggacattgccaaacaaaagtgctgccactgcgccacttgttccgttttgtgctgcctgaagccattcgggaaaaagtgatctcgatgggagcgagcgaagagtctctggatgaaaatgcgccgtcttccttcgatgttggctctggtacgtcgtgtacatatcctattgatttttggttgtgtgggaattgagttcttactttttgatctggaccgcaggagttatgtcatttgatgaggagtatgcccgctggttgcagcatttgtacgaaactgatttgggtacgtagcactgaaatctacctacgattgatatgattattgctgacaacgacaatgatgtctgtttggtgttacacagatacccctggaaacaactatgatgacgaggtacacttttgtgaaatgctgcgtctatctatgagttaagactcacacgcgcgtgctttggtgtagttcgtgcgagggattcctgtcactgacatccagccaagcctcgattaccggatcggtaagcctttgtaacctcttgtgctaggcagctcgattactcaccttcaaggcgattgcatttgtttccgtgaagtgagcatcgagacggaggtgaacgaaccaccctctcctgctcgagaccagcacggccgccgaccatacacctccaaatcgtaagtcagttttttggatggcttgtaggcaaggctaaactgacgaaatttcgttattgattcagccgtggagccccagcttcgctaatcaaccagctccccacgtacactttcacagcagcaaaagaacacgccgaccaagccacccctgagtatgttccttctcctctactgctgatgaagtgacaaattctcattcgttttgctacattgctgttttgtgtttagttgcctgatatgccgctgcagcttcgaggtcggcgaggagatcaagtcgttgccgtgcttccactcgtatcactccgactgcatcgactcgtggctgtctctgaacaaggtgtgcccagtttgccagttcagcgtcgaccaaactcaactcggttagagtgtcaccatgcctcacgctgtgaattcactttggggaaatgcacgaagaaacaaaatgaatacacgtgaattgataatttatccgcatcaagggaagccctctttcatccgcagtccgatctacgatgaaggtgttcactactcccttctccttagtgttcgataaggaatacttggacgatgccgatcacaacgcctagtgcacctcccatgaccacgagcttccactcgtcctcctcgaagatcgggtgcagcaagttttcaaactgctcggagctcagcatcttcatcttctcgcgcagcgtaacctcgagatccatggcgacggtagcgtaaccctcgatctggcgcagactatccgggaagatctcgacgatgtggttggtcacatcctccttgatgttggcgtacatttcctcgccgatgctgaagttaataatcttttgcgtcgtctgagtggcggcgttgacagcctcctggacattgtcgtacacgagctcgaacaggcgatccgagtacggccccttcaagatcgcctcgaagatgttgcgcgagttcagcacgtcacgcgccaccatcttgccgtaaacctccgcgacctcgttctgacgccgcaggaaaagtccttggaacgtgatgccacagtacttcttggggttcacaggctcaaagatcatcttgagcgccagccagttggtgatggtacccacgagcaagccgatgacggggaacaccacgatcgggtctgagtacacgaaccagatacccatctgcatgaggccgaagagtcctcccatgtaggcacccgagttccggatgaaggccagctccgagtagccgcaggtcacgaacatattcaccagaagctgcttgtccttgcacatgttggtcaccaccatgtcctccaggtcgaacacgtcctcaatattgttgcggatctcgtccataagtgcctcaatgtgggcgggcgattcctccttcaccttttcgacgatctcctccttcaccttggtgggcagcacggcccacaactcggggctgtacttgagcgccatatcctccacgaccgtgtgaatagtgttaaacaggatcggctcgagctccttcacgacctgcgccggctcaatgcgagcgaagacctccgacacctgcagcagctggtgcgtcatgatctgcacagcctgtcgcgccatcttctcgcctttactggggacaatgccctgccatccaaagcccgtattcgtgtcgggaatctgcatgcagcccgtgtactccaacgggtagaacgtcatccagagcgccacccaaatgtggaagtacgtgaacaccacgctgacgagagggatcgagccgtacgtgaccagactggccgagtcgatgcctatgtcctccaacggtcctttcagcaccgtgaagcacaaaataatcaggataaccacgagcacacagctcactataatgggcaccgacggcacctccaccatgggcgggaacttgacggggatcgtcttgtgaggcgactcgcgcttgatcctccccggggagttggccagcggcacgaagtcggtgacgatagccagcgtgtcgtcgctggtggctacttgcaccatccccagcagcgtgaagcgcagactcgtggccaggtcctgagggttgagctgcgcccagtccgcggcggtgaagcgcacgacctccgcgcccttgcggcccttcaacggcgccacaaagcgcgcgtagcggccgtcctcgaagcgcttgagccattcctccagctgcttgggcgtccagaactcggggttcagcagcaaggcctgcttcgagtcactcgctcgagccatgggggtacgctggggttatactcgggttacgcggtcaatacggcgcctacggagacgcggaaggcgggggaggggagaggatacgcgtctgcaggcaggggacggcgtgggcggaggcggagaggctcccggtagctcgtacgacgcgcgcaagcttccgctcctggcgagcacaggcgagacggtaaatgactgcggagtagaactggttgacgaaggggagacgcgtcctgtttttgtcgcgcggagaacacccggattgagcaaccaacttacaaatgccaagtgaagcactctgaacaggcaacggcggacggtctaaaaacagcagcgcctgagaaactggagtccaatagaaaaagccctagtggaaggattacgccagtagtcagcgccttcctacaggagctgcgcggcaaacaccagcaaacaccagcaaacaccagccaaggtgtcaacactgcacttgctcaagtgcttgtccacttcggtaaggatacatgcatgctggaacagcaggcgccgtcaccactcgcgctttgcaatgttgccgtggcgatcgcacgaaaggctatccgagtgacccaacgttggacgccgattaaaaaaatatggattctgcaacagcagatgtgtgtgtgtgacacaccatttcaccaaaagcagcccttcatcttcgatggcatggctatcatttggagtgtcgaatttgcctcgtgattaaatggcgtgtcgatgctcgtgaactcgtctgtagccgccgagatagcgtacatgcaagcacagcgagagcgatcagcggcttcgcacagtagagccgcggcagttgaaatggcgtagttgatgtcctgctgttgacgctgcgcggttcaacgtacgttgcacagtcgacatgttaccctggcgttatcagactgctcgcgagttgtagaaatcgtggtagccgagaaacacgccagtgcttctcttgtcaaataccctcattgtcatccaacttgatagagatgagggagtatcgccttcttttcgccattgtttgaactgcagcttttgcaaatctgcgagtgactcgtcgcggaagttgcgaatccttgcggccgaaagccttattgctcattgccagctcagctgatcaatcccctccgattttgtcgaccagcactgcaatagctagaaattcatctgcgctcttgccacgcttgttcaccttcatcacgtacgagacccacgtagccaactcagggttcgtaaagacgtcgtcttactgtactccctaacgctaacatgttagttgctatacatgttagctaactgttagttcgtgtctagtattttgagctaacatgttagtagcgttagagcacaaagataggtcaacgtgagtaaatgtaggtggagaaaagctctatttatataaacgcttgtaagctattctaataatctattctgacctgttctcgcattgtttggccatagtgtagctgggactaggttgcagaccatacttgaagttcaaaccagacatagagggcatacttgaagtttaagccagacttagaggacataaatttgttcaactcttagctttatttagtgcgtgtgcgccaagaatgtatcaataatctaatcttatccgatatggatttaattcgtagatatgtgccaagaacgctagcacgatacatagttaaagtaatggcccgagttgaagttgtatcacaagatgggaccctacgataagatattcctatctttaatttctcttcagccactgctatttaaaggttgcgcttcaacatatcccttcactccttgcctatctagccttattatggagtagatcgttcccaaatggttgccaaatacattttcaaactatacagtacagctatacagtactaacatgtatagtttacaactaactgttagttagtgtctagtaaaattagctaacatgttagtggagtacactacgtcgtctccacttgcatccagtttgagatgcttgaaaatatcctcggcgctttttcctttactcagtcacagctcctcctgcaaacgggttgcaacagacttcgtgctcgggtttccttttgctgcatcgagcatcgatgttagatctttttcgccgtagtgagtcttcagctctgacgccaccacttcgtccgagtcccccctttccacccctgccacgtaagaggtccaggaatgatataacggactctcgagaagcttctcgttttgcttctgcacgttaagaagcttgaagatatcgtctgcggtcttcccttcggttatccaactgttgcgctgcgcgtattccaatcttgcagcaagtggccccgtgctttcgctcttcttgagcagcatttgagccagatccccctcaccgtagcgtgcctttagagtcagaaatatcgatttgtctgaacccgtgcccaacattttcacatacgacgcccaagtgtttaccaacgggttctgaaacaacttgtcaccttcttcgtcgagtttgagcagcttgaaacccgcgtcctcacttagttgtttttcgccgcgccacatattcaatagagctgtttccataccctcggcgatggacatcgttgtttcccgcccgcaaacatgccggcaagctccaggttagagtagctaattttcatcttgacaagcagcaacttctacggatcctcgcttagagcgtccgcttcaagatggggttctccagtatgctgtccgcttcctggtccagcttcatcaacttgaacacatcgtccgccgttttttcctggcgaatccaattggagaactggactccctccagtttggtagcaagagtggaacttctggcggctacgagcatctgggccacagcttcatctccgtattgagttgtcaacgttgatagcatcgctgcatccactgcgtctggcgttttcttgtaagacttagccatgaagcgctcgaacttctggaatgcagggtcgtcgaacaggttgaaggtaggtttgccaagtttcagcttggcgaagtacttgtttgctgccttttgtttgtctggctttagcttctccatcagcttgggaatgttttcgaacagcctctcttcgaagctggcgccttcgcctgcccgtaggtgccggtagactcggatacgcgattggtcaagaccgagagcatgaagtggcgtctgagatcccatggtttggtttgtagccgtcgagactccatagacgcaagctagggcaacgaccaacaacattgcacagtagaaccgtgggggttgaggtaacttgggagccatagtggaaaccagggagctgtcgcttgatggcaaatttcaaagtggcagtggcgatgtgcttgggcgtggtcctcgtggtcctcgcgtagcgtgttgttggttgctacacgcattatgcgtgtagcagtggagtgaggtcgcgcaatccttgattgcacttcaacttgcctttatgttttcaacaccacgtttacgtatcatacaccatgattgagggggcgaacgtggacaaatcttccagaacgacacaacgcaatcagaacgtctagaccaaactctgaagcagccatgggcgtgattccggtgcagggcgacgccgactggaacgcgcagatgcagcgcgcgggcgggaagctggtggtggtggacttctccgccgtctggtgcggcccgtgccagcacatcaagcccgtgtaccaccagctgagcggccagtacgcggacgtggtgttcctcgaggtggacgaggcgcagaaccgctcgctcatcagcgcgctgggcgtgcgcggcttccccacctttcacttctacgtgaaccagagcaaggtggacgagctcgtgggcgccgaccccaaccagctgcgcgccaagatcgagcagtggcgccagtcggccttcaaccccttcgcgtcaccgggcgtgacgctcggcgcgggctccggagctggcgacgccaagcccttttcagcggccgaggcccgcgaggcgcgactcaagaggttcaacaacgtcagcctcgtgccgaacgcccccacgccggctccggcggccccgaaacccgctgccaagcctgcgccggccgtgccggactccaacatggtgtgcgacccggcgacgggcgtgtgccgtcggaaggatgacgacgaagagatgatggaggagggggaaggggccgagatgggacctccgcctgtgaacgaggagctgctgacgcagctgaaggaaatgggtttcgacgacctgcgctcccgcaaggcgttgctggccacggacaaccagggcttggaggtggcgatcaactggctgggcgaccaccaggacgacgcagatatcgacgagcggatcaagtttgtggacctatccaagacggctcccaagcgtgagctgacgcccgaggagaaggcggccaaggtggaggagctcaagacgcgcattgccaagaagcgcgcggaacgggaggaacaggagaaggtggacctgcgtgccaatgagctcaagagacgtaccgaaggacaggggatgcaggaggcgcgcgaggagattgaagccatccagaggaagatcgcggcggagaagatgaagaaggacaaggaggacgccaagcgcgagcgcgaacgtctgcgcaagcagctcgagatggacaagcgtgagcgccacgcgcgtggtggccggttgggcggaccgccgattgacgtcgcgcctattgatgtgggtgccaagaaggaggaagagaagaagaacagtccggttctgacgccgaaggagcagatcgtgaaaaacgtgggcatcctgaagaagtaccgcgtgggcaacgatggactcactgctctcaagacgctgaacgtgtacgtcaagaacctcatcgaaaagcccgacgaggacaagttccgcacgatcaacctagagaacccggcattccgcaagcgcgtggctagcctcgtgggcggtgtggctttcctgaaggctctcggatacgagaaggatgaggctgatggcaacctcaagctttcggtggaaaagcgtgacgtggagctactggagtatgctcgcactcagctccagggtgctattgcagagctctccaactaaagacattaaataacagcttgtcgcgaggatgccgcgggcaccttttgcttgctacacaatacattttgcctctatcaataccgacagaggaccaaaaactccgctgcaataacttccacacgcaaaaagcgtcgcgatttcaggctgcttgggtagtgctcgaccaagcccagcgatctgcccccacgctcactttcattcaatactattcggaacttcatatcttcagagggaaaagaagcggccgaataatcccttccgttgctccgccggcttctcctcgtcatcaggcttcggtttggcaatgaactcgctgctttctgtgcgcttgtttgagtcctgaagagggacgtgggctcctccgatgggcggagagatgacatcggtctgaataccactcacgataatggacacgtacacagagccctctagcgactggtcgtaacacgtgccgaagatgatgttggcttcgtcgtgcacacggctgcgaatgatctccatgatctcatccacttcgaacagcgtcatgtcctctcctccacggattgtcaccagtagtccgtgcgcagactcagtcggcaagtcgcccagcagcgggttcaccagtgcctgctcagcagcttttctggctcgaccttcttcacgagagatacccgagcccatgatcgcacgcccagcattcgacagtatcgtcttgatgtcggcaaagtccaagttaatgagtcccggccgaacgatcagatccgtgacgcccttgacgccttccagcagcacgtcatccgcgtagcggaacgcctccagcatggtcgtgttcttgttcgcgagcgccaacaggttctggttgggcacgacaatgagcgtgtcgacgtacttggccagctccttcactccggcattggccagtcgggtgcggttgggtccttccgaccggaacggggtgctcacgacgcccaccgtcaagatgcccaagtccctggccacactggccacaacgggggctgctccggtacaggttcctccgcccattccgcccgtgatgaagagcatgttgctgtcctgcagcatctgctcgatctccttccgctgctgctccgccgagcgcttgcccagctcgggcttggatccggcgcccaggcccttggtgatgtccttgcccagcgtgatcttgtgcggcgccagcgaccggcccagcgcctggcagtccgtgttggccacgatgaactcgacgccctccagctgcgacgcaatcatgttgttcacggcgttgcttccagcgcctccgagccccatgaccgtgatccagggcttgccgtccttgaatgtagccatcagcgggcgtttcttgccttcctccttgtccgcggtctccgaggcggctgccgtcgaggcgggggctttggcggttgacgctgcggtggacgctcgcgccggccgcttccgccgctcaatggcgcgcttgggcgccctccgaggcgctggggacgaggcgggggcgggcgccgctggactctcgccgttaagcctggcgctggcctccgtgtgctgccatcgcgcggactgcagcaggggtgacaggcgcgacagctgcagggacgccgagcggcgcgattgcagcaggagtgacgtgcagcgagagcgcatgggggacgaggggagccaagccgaaacacctggtcacttgatgcttcccggaaaccctgatgtccagagccacaaaatggggcacgttggattgaccaaactgtaattattatatagttcgtaccggtataccggtataccggtattttggtacagtacacacacaaaaatgcagaatcaggattttggttttgactttgaagtggaccagagtctaaaagcgattttgatctgaagtttctgaagtttccttcgttcgtccacggcgagctgaagttgatccttttgatcctccatctcctcccactcaattgacggtacatgtaagacagcaggctgcggatcaaaaatgcacctgactcacgtgtcacccccgcccttgatgggcgaagctaacatcgattctttccttagctcacccgtgaacactacatgtattagtttacatacaaaagcactcaagctcagcctccagaagctcttgcccagtgcacgatgcaagcaacctctctagtcccggatataccgagccgccagtcgccgtcggagtggccaattgcactgcagttcgctagtttcccaacgaaagctgcttggcaagtcgacggtgacgaccacgaccggcgtggcaacgcgctgtggacacacaccgtccagccaccagcccgtctcattttagtggcagatgtacggagagcagatcgctctgcgttgctcatgggatctgcttttacggctgctctcagctccagccgacaagacgtgtggatagcggtcgactcttcgctggtctgatgatcccagagcccgtggtcattccacgttttccccagcgagtccgaagtcaactcgaccacgctccgctgtgagtgctaagacctacgatgcgcgtctgtcacttcactctggttgccacggccatcatcctggctgccgcttcggcgaactcagcccaagacgaaatatcgacggcatttgacggcgagaagcgcaacctgagaagccaaaacctgcttgagtggccggagcgccttgaggagtatgtcgagcaccacaaccacatccgagaaatcttcacaaggtggtgtctggaagataagaagcccgaggaggtgatgaaggcggcagaaaccgaaaacgaaaagaaggctgcggcgctcttcaagagatacaaattgctacgctcgcagcatggaagaagactgttcgtgctggagtgcaatgtgtaaatggatatggaggagcataggagcaaatagacgtatcaaaagcacgatgttttccttgttactgttaatacgacttcaaaagcacttcgtagtacttctagcctcgtgttctgttgcttcatcgccaactcggttcatctcgccagtggtgcattggcggcgcgtagcactatattgtcttacttgctttcaatgcagtctattacatctaacaatgtaagttttaaaatgctgtgttttgaggcaggaatatgtaatctaacgttggtggcgcccatggtgcggcaccataaactttgtcatcacactgtttacatccgccagcgttgcatatgctcaaagcagcgatcttttcaaggcccacaattgagaaggaaaaagaaagattgatttcctccttgtgcagtgtgagattggtcactattacggcgttcttcactagtacttaaattacttcgcagtacaactattttgtgttgcctctgaagtggagtatcacagctcgatatctatagcttggccatggccgcctcagacccagctgtgctcaatccattctttctcgatcagatccttcataacatcaatagggtctaagaaagatgggcgttccaattgtaaacaaaggtttacaaacttgggtcctcgatacagcatgcgttttgcatcgttttactttgtcgtcggcaagcacctttcatcttcaatccaaaaagtagtgcagcatgcatgttgtatgaagaaaaaactcggattatcaaaattatttagcttgtgcatcaattgacaagcactacctgccaggttctccgaagtacatatactgtatgtgttttaacacatattaaaatacttcaagcacacaatgatcctaccaaaggtgccgtaaactgccccattggtactgtacgattcgtacacatcgtggtgttgctcagagtttgcataagatgtgcttgtgtggctgttctcagctggcatagtattctctgaattccttgccccttgcttcattcaacgattcaccagaaagagctcaggtcactcgactgctactgcacaagaccgatgcgtgcttacaacgcctttttggtcaccacggtcgttcttctaactaccagcaactttgtctccgcgggcacgaacgcacaagggaccaagtctggccagcggcacctgcgaagcgatgacaagaacgacgcggacgctgcttcggtccacgaagacagagatggtctgttctcgctccccgaggagctagaggaactggtcgagacgcaccatcacatcagggaaatatttaccaggtggtgtctggaaaagaaagaaccgaaagaggctgaggaggaagcgaagtcggaaaaagaagccaagtatgcgaaactttacaaactgtacatgaacaatgccgccggagacaaggaccgaaggaagcttgaagtgaaggggttggagtgcaatcttctgaagaacaaggaaagctaagtggtgcaggtattcaggacccctccccactcttccgattgccagcagtagggacgaaaacactaagacacggttttaattgttcatctcaaatgctaataaatcaccgggttggtttaatgtttgtctgctgtatgttcttgcctcggcttctttctgcttggtgctggtgtcttcaaaatctccaaagcagacctctctatttggagcactctcgactttatcactagcaaacgatatggaaaccagttctcccccaagcacttcagcagccggggcacggcgcaagtggctgttcatctagccgcgtggccgatcgaaatgccatgctgaagctgggctacctgcaaacacattaaaaacagcatgagtatttagtgtcaggtcataaggtcaaataggtacggtaagcgaaggtacttacgagttgcagcgagttgtgtagtggcacaacggtctctatggttgaagacgcggatattttttcttctctgtccatcgtggccgggtcgtcgtggtcatcagcaaccactttgctgatctccacacgctcctctgcaggaggggcgagcgacaacacggaaggcggaggtgacgtttccgtcgcttctgtagacatcgggatcgtctctgaaggcatctgaattgccgacgaaagcgtgctcaccgctcccaaattcacctcctcagggcacggattttcagccgttccttcaccattctcgtcgctgtgactgttgcgtacccactcttcgtacgtctgctcatcgccctccgcatcttgctcttcgtcgaccggatgcaaataggcgtacttgccaatgacacccacgcctaaaatcttttccgggataaagtcgccgcaagccgagtagttttgcatcagcaactttgtacattgtcgtccgttgttctcctggagaacgcgcacagcttctgcaaaatccatcgcgtcaatgcgaatgtcgtttacggcaacgatgtggttgtctggacggatcgtgacccaatcaatatcctcacccacgacgataccaatgcgcttgagcacaatcagcggctggtcgatgaactcgaactccgggatactctccacctccacgacacgctcgtacaagaacaactcgtactggaaaatctcgccaactgaggcttgaacaaccgcattgcagccgctagccaccacctgccgcgacatcgtattgatgtcgcacttcacgtacacaaagcgaaccgtactggtcggtgggatgtccttcgtgctgatagttagctgcccatgtgcgcccgcaggaacgtagtgataggacccgatctcgatatcggccgagtcttcttctgagatcaacacctggatgtaatccttcacggaatgcgtctccggcacgtcgtactccactgcgtccagtacccaacatccattagaacccccactccaaccaacatgctagcacagttaacgtacatgtaacgaacgagcccttctcgacctgtccacccatatccagctgaacgatgccgctaggccggaaggccagcagcttcatggcgtacgcgctcttttccgtgatctgatccagcgactccttcagctcttgcgcttgcgcgacccactcggacatgtgccctctctgcagcaagtcctgcggcagcaggccgtagctctccctcatggggcgcgcccccgcgtggatgagcatcttgatggccaccgcgttctgcacgaagcaggcgtggtgcagcgccgtccagccgttctcgtccttgtggtccacattcacgcggcgctgcagcagcaagtgcaggatctccgcctctttgggcatgagctccaggtctgcgtcctccttgacctcgttcacggtctcctcggcctcgctgttgctgctgttggagctgtcccgggcctcgttggccgccggatcttgctgctgctgctgctctgtctgctgctcttccgcctccgcctcctcctcatctgccggtgtcgacgcctcgtcgtcgctgtcgccgaagccgtggaggtcgtcgaagtcgtccagctcctggtgctcgcgcagatgcttcaagctggccacggccagcagcagcggcgtgcggccgctgtcgtccgtggcctccagctcctcggccgtcgcggtcttgagcaggcggtgcacctcggccaggtcgccgtactcgcaggcgctgtgcagcgtcaccgtgttccccatggccgttacctgcctcgagctcgaatgggggatcgatcgatcggctattgaattgcgcctgcgcttgccacgttcccagcaatagcagctatgggaggcggatattgaatatggaagggtgtgtggcacaccataaaaatcacaagacaggtaaacccgtcgtagctgctattgttgactgactgactcagttgtgttgcagtatctcgctcgggagacgcgaatgctgcgcgttcatgacaagtaaggaggaaggctgaagctgtgcggcgtccattgcgtctatggggtgttgacatcatggtgttgttgtgaacgtgaccagtgcgctgcttcgctcggtgtcgacgctgcccgtggtcatggtggcggcgatcgtgacgctcgagtactacgtgtttgtgagcgagcactggcttcccgcgttccagcgagcggtgggcttctacattctgctgcggatactagaggtcgctctgttccacttcgtggtagggtgcatgctggtcgcgtactacaaggtggtcttcacaggtgcgagctcgtgcagtgacgggaagggagaggaatccgagtgctgagtgtttattgtttgagcgcagaccccgggtatgtgacgcctgctgtggtgcaacgcatcaaggacgcgatgcaagaggccctggaagagggtggcagcaagagcccgcccacgatgaattcgtgccggcggtgcaatcaaatcaaaccctttcgagctcaccactgcagcttctgtaatcgctgcgtgctgaagatgggtacgtggtgctggtgttcgaccgaactggacagccatgtattgacactattgtgccatcttgtgtctgtggtgtgcagatcaccactgcccgtgggtcgccaactgcgtcggcgagggcaattacaaattcttcttccagtttgtcgtgtacgcgttcctggcgctgtcgatgtgcgtacgggctcttgctgggccgttccaagccgcacttttcagtgacgacgcgccccgtggtgctgagagtttttctgcgatggctgttgttgggtttgtgctcggcggagcgttggctatcagtctgctaggcttcatcgctgttcactcgtatctcttggcgcacggcgcaactaccatcgaatgccacgcgtacggccgtgcgttcccattcaaccagggatggaagaagaactgcagggtggtgtttggtgagactaccaaggactggctgctacctacaacgataaaccatcagaaacgctacgtgctgcatccagcggaactggagcacctcactgcagataactgcttcggagactccagcgaccaagaagacgacagtttgctatagtaggaaagcatatctgtgagttgaaataccgattcgttaacgttactctgctgcccgcacagtctgttccaacagtacttcattccagaatttgttgcagagcagccagggcacgatccttgattactgtggggggacctcaccggcgtggaacacgagcgacacactgttcacgcagtggcgctcgtccgtaggcgtcttgaagccttcgcccttgaacacgtgacccatgtggctaaaaacaagcaaaagatcgaatcgcgttagatgaatctaagcaacaaacgctcaaacgcagcgtcggcctcctcacccgtcgcacttggcgcacatgatctccgtgcgacgaccgtcagcatccggtacagcctgcatgttatcatacaacagtaattagatagagcaacactgcgtttgcatagcagacgggtgtggtgcaccttgatggcgccggggatggcgtcatagaaggcgggccagccgcagcccgagtcgaacttggtagtggacgtgtacacgggcgtcttgcagccagcgcagacgtacacgcccgtctccttgtgcttgttgtactcgcccgtgccggcgcgctccgtgcccttgaggcgcagcacctggaactgcatgggcgtcagacgctgcttccactcctcgtccgagagcttcatggggtcactactgctgctgctgctgctggacatgttgcgcacaaaggcggcggtggcacttctacgggtactgagagacgcggggggcgagcgcgcggcagcaagcgacagcactgagcgcagccacttggtcatccacgaggcagattgaagaatggcgcactggccatgtgaagcgagagtgatggtctaaccttcctcatcgcatatgcccgtgggaaggttttccaagccccattcaaatcccaagtgccaaacgcgaaaggggagagcaacaaggcgggggcgatcgatcgaccatggtgttagcggagctcgggtccaagctgcagggcgcgctggccaagctcaaccgcacgacggtggtggacgacgaggtgttcagcgcgctgctgaaggagatctgcggcgcgctgctcgagtcggacgtgcaggtgaagctggtgcggcagctgcgcgacaatgtcaagctggccgtgagcctcgaggacgcgagctcgggcgtgaaccgccggcgcctcatccagaagtcggtcgtggaccagctcgtgcagatgctggagcccgaggcgcagccctacaagatgaagaagggccagagcaacgtcatcatgttcgtgggtctgcagggtagcggtaagaccacgagcatcgccaagttcgcgcaccactaccagcgcaagggctggaagacgtgcatggtctgtgccgataccttccgagccggtgcctttgaccagctcaagcagaactctactaagctgcgcatcccgttctacggtagctacacggaggccgaccccgtccgcatcgcggaggaaggtgtggcccagttccgggccgagaactacgagcttattctcgtggataccagtggtcgccacaagcaggaggccgacttgttcgccgagatgagggaggtctcggcggccgtgcagcccgacgacgtggtgttcgtcatggactcgaccatcggtcaggctgtgttcgaccaggccagcgccttccgtgaaacggtggacgtcggaagtgtgatcattaccaagctggacggtcacgccaagggtggcggtgctctcagtgccgtcgcggctactggatcgccgattatcttctacggtacgggcgagcactttgccgactttgagtcgttcaatgcgcagagcttcgtgagtcgtttgatgggcatgggagacatccgcggactgatggaggaggtgaagaccagcggcatgctggataaccaagaggaaatggtcgaaaagttccagaagggcgtgttcacgctgcgtgacatgtacaaacagttccagagcgtgatgaagatgggaccgctgagcaaggtcatgtccatgattcctggcctgccgcagggcatgagcgagatgatgaacatgggcggcggagaggaagaggcctcgaagcggctccggcggttcctctttatgatggatagtatgacggacgctgagcttgatggcatcgtgccgctctcggaatcgcgccagacgcgcgtcgcgcgtggctcgggctgccagctttatgaggttgagtttctgcttaagtgccacaagcagttcgcgaccgttgtgagccgcatgggcaagagtggcctcatgaagactggcgatgcggcactcggcaagcagatggctcgcaacccgaacgctgtgatgcagcagctctccaaggtcatggacccgaagatgatggcgcagatgggcggcccgcagaacatgatgcggatgatgaagcagatgcaaggtatggaccccagcgcactaggcgatatggccaagatggcccagagcatgggtatgaagatgcccttttagattcccccagctactgtcaaccaggaggatggaaacgagtgacgtgagggcgcttgcgacaacaatacgagtgctctttcttgcatattgacgaggcctttgtgcatttttttcttgcgagttcccagcacaagtcgaccgacccgaacgctaacagccgccccgtgtggtgaaggtgggtttgcgttgagcttggtatatttagccgcggtggaaaacagggaagcatggtgctaatcttggccaagtgggcctcgagcacgtaacgaacttgtgcagggcttcccacgcttccaacagctacaacccagcgcaagtctgtctttccatctacctgctactgttgagctcagctgggcagacggatcgtgcgcgcgtttgggtctgcgcgcttcggtggatgctggcgtcttcagctgctgtatgctttttgatcgtgtcgtgagagggcaagacgtgctgtcaccgacgcattccccagcacagagcaggctctcgccatgaaacgcacattgatccatccgtggcgcaagaaggttcaggatgtggcgacggtgcggttgggaccgcttgcgaattcacctacgcggtcgagtatcgatgcttcgcgcacagctacggcatcgacttcagcatcagcagcagataaaccggctcacagaagttcgtcgtttggttcccggacatttccacgagctgctactgtggcgaattttgtccatgataatgctctatctatcgcgaaaggattgcctcggaaacgaaagctacagcaacaaaagtcattcccggacccttcgctatacacagcgccccgacgcgtacgccgaaatgatctcgtgcctgtaattcagccggagaaagtgaaatacgaccgctggttcattcaaccgcgtgccgcgtggaaagtgcggtgggatctctggatcgggtttatcattgcctacagtgtcatccttataccatatcggattgggtttggcatcgacctatctgtgagaaactaactggtttacgctaccaaacgaacatggactaactgttttgtgcttttattttattgtaggggtgggagcagataatgaactactgttttgatagcagcttcgccgtcgacgtgatcctcaacttttttacaggatactatgacgaagacgtgttggtgtgcgagcttcggagaattcgtcaacgataccttcgcagttggtttatcttcgatatcgcctccactgtccctctagaccagtttttacaagtggtcaccaacgcgtcatcctctctactgacgctcaagcttatccgcgtattcaggttatttcgcctgctgaagctcatgcggttgttgcggctcaagcgcgcgatggaagctgtgcaagtggacgcactcaacgcgcatgtgctccaaaccctcaagagtttgctcactattattttcatcatccatctcgtggcctgcggatggtatatgttctacacatgggatccaacgggcccgaattgggtcaccaatatcgaagcaaagggcttcaaaagcccgtaccttgtaagtttctactgggtatcgaataccatgatgtccgtgggatacggtgagatttatgggatcactgatggggagcggctgtactcgatcttcgtggcgtgtctcggctcaatttgcgttggtatgatcatcgcaaacattcaaatgcttacggaaaactataacccacgaggcatcatgctgaaacagaagctgcaagacaccaaggagttcctgatccagcgtggcattccacgacgtctccgtcagcgagttatctcacagtttgaatttcactggagtcaccgcacagtattcgatgaagactatttactacagcagttccccaaaagcctccagtacgaaatccttgctgcgtcaatggaatcgttcgtgaaaaagtttcctttcttcggtatgacttctgtggaatttttcgtgttcgcaataccgcgactgaggccaatagttcttggccccggacaagtacttgtggatgctgaaagcgtttgggaggagctctatttcctcacatctggctcggtggagaccgtgcagtccaaccttgtggtagggtctctctcgcctggtgaaatttgtggcattgagtatcttgtgaactctcgtcgacggtacacgcacacctaccgctcgatatcaaaaaccgagctctatgcgatgtacagcaaggatctcctcgaagcgattgataagtgccccgtagctcacaagtatcttgaggatttagcagtgatcttgggtgagagatatgaggagtctgcgaggagaggaaggcgagccatgcaacggatgaggtcgattcgggcggttcgacgcgagtcatttacgagaggggaaccatttctccacaaacggcatcgcaaatcgatttcttcgataaacctccacacgatggcacccgacttgataactcgaatggacatgaccgttgcaggcgacgaagtggtgacgcactggtccgttattcgccactactccaagctgcgaatctcgtgggacatcgtaatgggcttcatggtctccatcactgccgtcactgtgccgtttcgaatagccttcgatgtgcaggatgtcctggtattctacgccacggatcgcatttccgacgtattgtttgtgttggacgtggttctaagtttttgcaccacgtacgtcgacgatacaggggtggagatcgttgatcggaaggaaatccgtcgccactatctgaagacgacttttttcgtcgacatcatggctacgatcccgtttgacttcgttgttgaggcggttgcagcgggtaatgtattcaagtccttacgacttatccgcaccctcaagctcatcaagttgctgcgtctaatgcgcctttcgaagctgctcaaaatgaattcgcaatggatggcagagttcgatatcaacgtcgacacagtccgacttctcaagcttctagccccagtgatgattattgcccactacgtcggctgcttctggttctacatgtcggccgatcgggatgcagatgatgcgtggtggggcaacttatactttgaggacccagactcgatcctgtccaagtacattgccagcatttactgggctatcacaactatgaccaccgtcggatttggagatattgttcctgtgaacgacctcgaaaaggcctactgcattttggttcttatcggtggcaccacattgtttgcgtacgtggtcggtactgtcattgaagtggcaagcaactcgaaaagtctgatgaaccgagagcacgaaatggtccagcgtgtcaatgcctatatcaaagaacgtggcgtctcgaccgagttcattgtggcctgccaggagcatttgcgattcgtcgatagtgaaaagacgttctttgcagagaattcattgctggatgctctcagttattctctacgcagtgagcttactctcattctcaatggtggcgtggtatcaaagatccgcttctttgataaaaagcccaagtggttcctcacgctcatgctgcctcgactcgtgccacaattctttctggaaggggacatcctgatttaccaagacaaccccgtcagtggcatctttttcttgatgaacggagctgttatcgcgaagacacgccatttcgctccggtgccgaatgctcacgcaacaatgacgagcggtagaagtcagtcatctgggggcgaccatgtcatcgcagaccaccagggtaccattgctaagatttacgaaggagagttcttcggctacaaggaaactctgacagagacagtggcacagtacaacttgttcgctatgcgagcaacagggacgtatttgctgccgcgtgaatgtctcgatgagtttgaagctcaatatccccgagtaatggatgagatccggtcactgataattcaatcgatcacgcgacagcagaaggtcgtctcaggttggcaaaacaacgacgccatcgggctaacatccgtcgatcgcgagcgcgtagccgagctgaacatcacccgtcgtgggggtgatcacgacactattcgagcaagtgtaagcggaatatccatgctccaccgaagacactcttcctttgtgtcgtccactggattgggtcttggccttatggctcagagcgttgcagcagaggtagctgctcagtcagcccagtactctcctcgttcggacacaagtactacaccacgcgaagaaccggaggaccaaaccgcagttgaagtattagcacatgttcctgatctccagcctcaaaagactgcacgccattcaagtgcccatttcgcacctggatcccccgtcatgctgccaggttcgatggagatgtacgcaaccgctgtgactgagatggatagcctcgcatcgtcttcaccaacaattcctgcaatggccggaactcttcaacctgatgacatttcaccacgacgtccaaattgcgctaccacattgtcgactgtgcacccaacggggagtagtgggcatctacctgcagtccgactgcgccctgacggtgccgccactatgagcgcgtttcgcgctggtcgaagatcgagcatatcgttgcgagatgttaatggccaacgccggccctcggagcgttatttggccatgcggaagaccgacgtcacagcgcttgttgatgagctgctgagcggggatggattccagatccagcgcacgggctctgggcgaacgcaaaaaccaaccgtcacgaactaaagagcactgcaatcggctcttaacttgttagcaccagagctttagcaatgttagtcctcctcatcttcttcatcttcatcctcactatcctctgcatcaaagattgccaaacgactgggaggtaccgtgacgcatagaacacctcgagaagcattcgcatgcacagaggctgtacttctacctgactgaacaggagaagttacgacccttcctcgaacttgatcaagccggaaagtgtgagttgggccttgacctgacaatgtctaggaattgtaccgacaacagacaacggttagtgtactcaagcatgcctatgttcttcataaaagctgctttggtcgcttgcgtgtgcccacctcgaagtcgctaggcgagttggtgcttgagaactcaacgtgatcatacctctgcaaatacagccactctgtatcaaatcataaacgactcgtgttacgtattattcgcacaatgagttgtccggatcaacagttcgtaccttggtgagcttcatcagtcttccggtcgagcaaaagcgctagctgctcactttttcccgaggcttcgtcaccataaaaatcgaaactctggcacgcgattggtgttgctgaattgtcatcggaaaagcggacaatagctgagtcccataccagatgagaagagtgaacatgaggggggtctacaccacgactcgctcgcagcagcactaaaacaccagactgcagacgaaaccccaacagtagcgtgctacgatttgtcggatgatcttcattaggtccgaagtgtgctaacgagccccagtcaatcgcctcttcttggttttcatcgtcactttggtcgtcatcttcagtatcatcgagcctctgcgagctaaacgcgtggcgaaaatggacgtgacactcctctacgagattcttgctgctccctattgagaaacacccacttttctcacgagcggtggcttttgcgagtgtcttcgccatcaaaccgagcaaagtaacccattggtcttgaaggcttttgaagagagaaagacacccctgcgatgacttttcagtgctgttccctgatgggactggccgcgtagacagttgccgagacaccgagttgccaaaggtagtttcaatcttgtacttgttgtgacttggctgttgctctcggtaatgctgtgcatattctgctgcgcgctgtaaaaagtcacacagtcgtcgcaaatttaggagagattttgcgccgtgagcagtagcacctacttcacgggacgcgtttccacctggtccatcttctcttgcgctcgtgtgaacacggatacgctctaaaatccactggaaaaagagtgcgaagtcctgacgagtttcatgaagcaccagcgtaaatttctccatctccaaaagagcgtcttgcgtagtgctaacgagagtattaagagcgccttccgtaataccgagcgtatttgtgtaagcttgctgactccacttcgcacgaccacgcatctccgatagcagaaatatcaggtcaaccaagtcacgcttcattctgtcttcagcgatggtcctcaacgtatcacagccactaaatagagctttttgcatgcgatggacactctgcaacacacagtctgtcagttaagcgctgcaacagcgacagtaatgataacagcatcactaacttaccatttcctgaatatcttgcgcgaagtattgtgcgagcgcaggagatgttatacccgtgaccgctacagacagcatgtcgacttgtggggggtcctcgcatgcgtatttctcgtatagagacccgatcaaccccatcttgagctcaaaaatgcgagtggcatttttccattctgtggtcatttgtcttccagtagcaacaactcggtccaaaatcgcttggacgcgatctacagtgtcggctacaagcaccacatcctcatggatgcgctggattgcagccaagtcgatagtgagaatgcgatgtagcttcgtctctgacgctgctgggtggctaccatcactactcgaaaagaccagcaacacgaacaacaacgacagatcgtgcgccagatccacccgctcaatccggaaacaatctttactgcccccttcctgttgaccacccacaaactgatgctcttcctccgaaaagtgttcgctcacgtcgattctcgtcagcatcactctccccatccaccacaaagcgataaagccccgttcatcagcagtaaccagcaccgtatcgtcactcactgcttcgttactgtgaccggcaagaaacctcgaggaacgacgttgaaatcgcgtcttcgattgagacgtcccccaatcaccttcaaaatccttcgggtgatgccgtttgttgctgggacctgcctttgaagcctcagcatcaccgatctgagcccagtgcattgccgtgatgcgatgttcatgacggagactgctccgtctttcgggaataatttcgcccgactcgatctcgaaaattgccacgtctccttcgtcgcagccgacagcgagctgcagtccatcgggtttccaggccagcgtcactatctcgaagccgacgtccgatggcttaatgtgcagcagcttttgccatgacgtcgtccgctaagaaaatagtgaagaatatactaacgttagaaaattatctaattaatttgataggactattttagttgaaaataattattttaaacatcattgtggttagacgcacgtgaaccaggaggtggtggtccagtgtgagcactgcgaccagatccatggtagggcaacaggccaccgctaaggagctcacgaagcggtcctgcagcgccacgaaggcgcgcttgggcagcggcatcttctgcgggttgtagcgccaaaaaggttttggatttcacggtttggttcagccaatagacgctcacgttgaaaatggctacagtactttttggatactttactctacttcttgtaggcttgtacccgtaccggtctatttgaaagacttgtggttgcaatcgggggcgaacgaaaagctgggtgatccccggttccttgcgccatagcattgccattaaagtgcttcttaccaacgtaaaaaatagtgtcaggtatttaagtacccactcaccctatgctgatattttggctcgggagcggcatctgatgactcgtgctaagattgaagggcttgcgcgtgcattatggtgacacatgaccgtttacgagtaacatggactcacactcgatccaatagtccatgctgaatcaaaaacggaagtacgactagctgtattccgtgctgcgactacagcagctgaaatgctacggtgccctccgccttagcgaaccctactcttgtgttttgcatgatgatcgattctacgcaattctaccgtaggctcggttgctgattacagggaggaatgccttctaccagagaccgtaacagaatcaaaggccattgtagccatgttgatttcagccaatcctgcagcccgaacaatcccgggaagcacgatgattggtttattcgaatttacccataacactatcgacgagctcggctcgttgggctcgtcgagctcagctcctttttgcgtgtcatttgcgaccctgccttccaaccgagaggtccgcattcctgcactcccatctcacaccccaagtatggccaccaagtctgccattgcactcgagagctcgtaccgcgtggcggtgatcggcgccggattggctggcgtgagcgctgccaacgcgttgctcgcctccaacaagttcgcggccagtgacgtctgcgtgctggaagctcagtcgcgcatcggcgggcgcgtgcagacgcaaccgttcagcgacacgctgccggtcaacgtggaggtgggcgccgcgtggatccacggcaccgagggcaacccgttctccgacttggcgcgcaagttcggcatcgccttcaaggaggtggcgccgcggaatccgtggctgcacccgggctcgtgcaagaactttttgttcttcaacggacgcgaacaactgcctcagcagcaagtggacgagacgtggcagtggcaagatctgctcatgcacaagctgcaagctctggcgacgtcgcccaatgccgcagaccaccagcagaaggcgctgtcggcgatcgtggaccacctcgtcgagtccgatgaagacttccgggaggttgtgaaggctccgaatgcacgcgcgagactggacgtgtgtttgaagctgattgaagtctggatgggggtgaacgatgatgaagtccagctcgatgactttgctgagatcgagctcattgggtacgttgttagttgcgaatggaattttacagctcggtcgacgcgctaatgacattgctactgtctttgtagtgacaacgctggtgcacactgcatcgccccttcgggaatggagcgcttcatcgacaacctggcggagcctgtgaaggactcgatccacacgaatgtgtgcgttacttcgatcaactacgagggtgcggacggcgttgtcattgagtgcagtgatggtcgtcgagtgacggctgaccacgtgattgtgacttcgtcgctcggattccttaagtctggcaagctgcacttccaacctgagcttccggcgcccaagttgggcgccatccaacgctcgaagatgggccaatacatgaagatcttggtggagtttcccgatgtgttctggcccaagaactcgaccttcatcgcgcagctcaaggacacgtcggcttctagtagtgactcggagcgccgagtctacttcccggtggtgttcaactaccaatttgccaagggggtgcctattatcgagggtgtcctagtcggtgaaaacgcgagcaaaatctccgcttccttcacggataaagagatcgcacacgccctcttcctgcagctgcaagaaacttttggcccgaacatcccggagccggtgaaccacttcattactaggtgcgtctattctgccagttttgctacagtattttgccccaactaacgataactcgtggggtgtttcgccctcaacgcaggtgggataaggatccgtggtcggtgggcgcctacagttctctcacagtggagagttcggccgaggacccggccattctgcgggaaacggtggccagccgcgtgctttttgccggtgaagccacagactacaagttccagggcgcgttgcaagctgcatatctctcaggttagtggaagatagagacattaattgtcgtttggaactgggaggacgctgaccgattgtcttgctgatgcgcaggtattcaagcggcagctgagctggtgggcgaaagcaagtaagaagagataagtaggaggtcgaacggccaaaatcttgtcaaagaaaaactaccaatcgatgtgaaccagtacaagtatcttttcagcggcatccccggaatcattccgccaggcctaattcggtgcacgtcctgtcctgttgacgaactgcccatcctcttcagcaggtccgcgtaacataagctgtttacaacgagtttcatcgaagtgaactcttcccgtagcataagcaacgcccctacaagatccacgcgttgaagtcgttgtcgtactgccacgctattcaagtgtacttccgatatccaccctgattctcggcccgagaatctcggcagccctggaggtttcagtgaagcagtgatcacctggtcaaataatccacgcagttggcgtgttcttgttgacggtggaggaatccggcggtcgtgctttgcgtaacgtaaacgaccgccaccgtgcttgaagtgccctgcaagcagcccagtggatgcccaggatgcctagcgcagcagcatgacaagctcgaggtcatcggcatatggcacggataccgcgtgaatgcgagtcgtgtagcgaaaccgaggcctctcttcccatcgaaggagcacatggcggtcgaggaattggccttgcttccgagtgtgcagcatgttaccacctagcacgacaagaagcagcgaaacatcatcaatgagaacagtcctggatttgacagcgtggagaacgaagaaaacgactgcccaggggggccatgccaagacgaccgaccgatagctcgaaaggagttaattctccttctcactctgcaatttgcaacgcatcaagcaaaacatgccaaacctcactagtgaaccgactgagacgccgctcgagagctcctatcgcgtggcggtgatcggcgctggcctcagtagtgggtcatggaacattacgccggcagtttttttccttaccgtaatttaccaccgagaacattcctgaaaccttctttcaggacagcagcgatttcaacgacgacccctctcgaccactttatagcaaaaccaacgccttttcggtataggggtagtttcagatccgctcgatcactaagatctaacagctgtctattctaacgacgcaccctctcgaccaccttagagcgaaaggggcattccttacatcctcaaccctcattagatacaggcgatcgttcatatcgcagtgatacaaaacaataaattatcttacaaaaaaagtcccatcctgataaataaaattaataagtatatataacaattactacaagtaataggaatgtgcaactacattttggatagtggatttaagtgtaaggctaagccatcgcaagagcgttgtggtatgcatccattttcaaagtttcctcccattgaaaatttctcgccagaagtcagtgaagatatgaggaaaaagataatttcagctccgatggatgaaagaatcacttgcttgtgtggatcatcgatggagagatggaatttcgcaaagcactgcaacaaagacaaacattcgaagtggatcaagtcaatgccatatccgcaagatcttgggtggtggggcccagactatagcaaatggtaagtcagctacttaattaattgttttctcaaaaaattaaaaggggtatgtatatagatacacctaagagataacatgtcgttcgaactcacatttagaaagtacaagaacaaaccaactgaggaagtatatgcttctgacctggctattgtcgttggatgcacaaccaacccagccttaacattagtgaggatatcaagatattcctacacagcaagttcctaaataatgataattcatatatgatgacttggggcaagtacaagggtaagagtctgaaacagatcagtcgtatggatccgaactatatcgactggcttcgtaaaagtgaattcgtgattgagaaatgcccaaagctacttaaggaacttaactaaagaaaaatctttttttttatcgctgcgataattacgagtgatcctaatatataaattcgtatagtataataatgaaaggatatatctataagatcaccaaccaagacgaatcgattgtgtatgtggctcagacacttcatgcgcggtgggaaaaccatcggtacggatttcgccggtggctaaacggaaaatccagagcctgttcaatataccatcattttcaagagcatggtatcgacaatttcgaaatgaagctgattagtgagcacgatattcttgagcagaaacaactacgtgaatttgagcaacttgcgattgattccacatcatgtgttaataaagttcgagctttcgtgagcgaagaacaaagagaagaatcgagattacggtatgaggaacttaatcgtgataaaaaatatgaatactgtcgccagtatcataaagacaataaggaacaaatagatgaacaaagacgacaatatcgagctgctaatagggatcgtattaatgagaataaccgtagaaaaattgagtgtgaatgtggtgtatcagtgtccaatcgaaacatgtctgcccatcgacgatctgcaaagcatcgacagtatgtggccaaccacagttaattatttgtctttttttttacttacgctatagtgaagtctagaacctctccggttagtctatcgaacgttagttcctgttcgctaattacgaggatcagcatattcacaccttgacatccagcgttcgtaccctggatctgaatcgcttggggtacatcgcgctcagtcaggcgactgacgtcggcaataagcatgcggtttgtgagcgaccacgtctgatagtcaagtagtccatttacgagctcaggggttagatctccattaatcgctgaaatcttagcaatttcgttggtaaaatggtggaaatcatagtcatgactgatatcgaacacctgagtcgagccaatacgaacgttaaagttgcgaatcgacgacccgggctgtagagtgtatggagcgctatcgaaggggctctggaactgctgaacagtagcagaagcaaagttgtttgtctgttccgcaaatggaagaagaactacgtacttagcattcttaacacttgccgatagctgtagatcgaaagaagcatttagttgagatgaggacttaccaatgccggcgcgctggtaaaaccactgagcgtagcaatcgttgtagcgtaccttcttgacaggtttgctgatgatagcttgagggttctcaagatgcacgaaaggaacatacaaacgagccgtagtgaaaggcatatacgtaccatcgatggtaggttcaagagtattaacaacagctccccaagcaacactaaatccagcagatgcggcaagcacaccactcatcggattaccggtagcagaagcggcaatcatgagcggacaactattaccagacgatagagtagtagaggttagcgacataccctttgaagcatctaccgcgactacagacgttccctgattcacgcggaaacgcaggcgaatttgagggttagccatcaagtcaagctcacggaagataggatgcagatcggtgagtttaattttaagcatgtagttccacgtccccatgattgcgttagcagctgtaccaccagctacgaaagctccacgcgaggtctggttagaaatggtagtcgatgcagcagcaccacctaccgacggccacgagctggagaagtcagcgccagccgtaggaggattcgatagaaggcgcttaacgaaaccatcattaggaatagttgcaccaccaggaggagccgagacagcaaaggaagacgagaatgccatggtgtttgaatatccatcaccgctggtagatgcggatccagaactgtatgataccgactgagcagcgtcagggtacaagaacgattcagctccgtgcttttcaacgtactgagggctgtagccagtctgagcacgaacgttattccaaaagagtttgtagtcagccatagagacgatagtctttccattgagttccagactcagactatcaataacgttcccatttccgcattttagagtagcacatagacgattcgcagcggcagtttgagcagtgccaccattcttcattgagaccttgtagggaagcataatgtaggcatcacggaggcttgcgaagccctcggaaccgttaagctgagctgtagcatcgatagtgatgacaccattctggtaagaaccctgatttaggtcaataacgtgtggcacacgcttgctcgaagataccttgatctccgggtcgctcttaagcgagctctggtacaagtactgatcggatagttgagtttcactcatcgttgaatctatatggatcctaatatagttttaagaaaaattaatattatgtcgcacctcatcaaggcaatcacctcagatcatgatctgatcgaactcgcgaaaaaaattggagtccatctggatgatatctatgaatcgaatgaaataacaaagccgctcccgaagaaagggtcatatctggttctactacgaccacctaatctcgatgtaggacactggacggctgtccataacggtgaatacttcgatagtatgggtgaagcagccccaacaaagtacggggtcggtaaatacaaccccaagcagtaccaaggtacgtatggagattactgtggtccattctgtttgctttggctctattccaagcaatataataaaccgcaagtactttcaaagatggaagatttaaatttaactattctttagtttgggaaatatagattaatcatgtatcgtgaattaacgatctccagtgatattcctggtcccaagctgaccaaagctttcaaaactggtaagctcagtcttacagctgaccaactcaaaggtagtggttctgttatccatcttcaccctgcttcatatgagaaagcactcaaggctcgcaaggcaggtcgcggcgttcgtctcgacatcaccagacacgaagtcaagaaaggatacaagagggctcaaggcggatcaatctggtccaaggtatggggaggcattaaatcggcgttcaagtttgctaaggactcaggtctattgtctcgcgcagccgatgttgctgtccccgcgctcgcaagtgcgcttggggctccacaaggagctaccccagcaagagcagccatccgatccatgactggtatcggtgtttatgattctgatagcgataaggaaggaggacgactaaccatgacagatgttaagaaaggagcaaagcgtgcgctttcgtatgctaaacgcaaaggcgttctgactgacgtcgtcgattctggagagaagtaccttctagctaaggcaaccaaacctgagcatgagaacctaattaagtctatccggggcgaggtccgtcgtcggtatggagtaggtgtcgctaaaccaaagggtaagaaatttgcaaagggttcgcaagcagctaaggatcacatagctaagattcgcgctatgcgtaagtctggtggttcatttagattataaaaaaagtacaattacccaatctatttttttggtctgagcaacagcatgattgagactgaagtatcacgaaagattaccttcgtatcattttggttgtagatgctgatagtaattgtagagcgagagccattatgacagttcatccacgcatactgactgggtttgtacgaaattagctgaccaattgcagcatcacctcaatcaaatgcgctgacaatgtcgccagaggcaacgtactcatttttgatcagatcgcaacgtacgatgtacgaactggtggggtgaatctgtgggatgatgttagagagctgagcactggcaacgatcactgaggtagaaggatatgtaccagtactaaggcctactactgatccaaaagatgcgttatcgatgatcaaacgcggaacacgtgtagtagtcggcagtccagttccaccagtagagtacaatccagtggcgggtcttgtccaagtaccaccgagagttggcaatgttgttggcgtctgagaaaaatcaacttgacatgcgtaatacacactgttttcactcagtttgaggtagaatacgttgtttccacttggatcgattaaatatgctccagcattcacgagggctgtctgaatgctacgattgatatcatcatacgaataaatgccatccgggagagtgatactgatagtagaggtggtagcagcagttggaacttcgaccttaaaacctgtgttagcaaattgcatcgaatcgatgttatattcggagttgtacatactgatgctttggactgcacacactacgtcgcggaagtcagcagctgaaccagggaacgagtatttccacgttgagttatatccatcttgaacgagattggttgagtcgagtttcaaaagcttgccattgtaatcgtatatgattatatccataattctgatcaaaaattggaattagttatcgatcgtgattggtccatcgaaattgtacctgatttgacccttaactgaatctatgaacaacatctgacctttgcgctctgtggctttgttgtagtaatagacgattgatcgatcatcaactcccttgatattaaaatctttcacaaccatctggaggtctcgcttagaattagctttcaggattgctacgtactctgagttcaatctgatcatcttgtccgttgcgaagtagctgtggctcaagaagatggttgatagcttgaagtggcttcctctagtgaagtaatgtgagaacaaattcttctgaagtagcttatcattgctgtagtcgtcgatgatgacgagctcaggcttattggagttcattggcgtatgacgtacgcgatcaacactcgggggcgactcagggtcggcgaatgtgataaagccatcaagcttatcgcgtagatactcatataactcctggtgaggattacgagcaatgatcgttagatgagcaaatacgtgaggagaatgctttagaataaacaaacaaaggttgttcttcccactgaacgatggaccaaggacaatcattctgaacaattttttaatatcaagcgctggtatatcacccatagcagctgacttgtattttttcggtaaagaaccaccgaagtctggaatagcactcatgactaaaatcgttttatctatataggattggacaaaatgagctcaggtttttcatatccacagccaatattccaatcaccggtttataatcccgcgttctatctaacgttagatgccactggctatcttacttacgattatgcccaaacgttgtatctcagtaataatgattatcgattgacatacatcactggtatcactcaaggaacagcaacaccaggagtagctcttgtccctggaagcggtggcgatatcagcgcttagctgtagtagtttgactgtcaatggagcatcgattgcaagcgctccatcgtatgtacgcagtattacgccaggaacagccgatttaaacaaagcgttggttcttgatggatcaaagaatgtctctggaattggatcactatcggccgcgtcgcttacgggtacgctacagaccgcggctcaaccaaacatttcatcggttggaacactgagcaatctcacactgaatacggctggaacaggtctatacaccccaaacctcaaattctgggatggagtcagttcttggacaaatttcaatcatgcttacttcatcaatgttctcgagggaggcgcttcagccagcaccgctgtagttctcagtagtacaaaggattactcaggcattcgcgatctaaccatatcacgcaatttgatcgcttcaatttcgatttcatcacctacgatcatctgtgatacgattagtaagtcaggtactcaaacgatgaatgcaccgaccctcaatctcaatcctacaacgcttcagatcaaggggactacgctcaacgctactggcgctgagctgaacaagctttcaggatgcacagcaactactgttgagttgaactatctggatcttaccttcggagctggaacagcagaagcatcaaaggctctggtactagactctaatagctcaataacaacaggtattaccagtctaacatcaactaatctgatatcgacttctgctactcaatgtcagattgctgctggtacttcttttacatcgacgactagggcaagcgatttcaacctcattatcagaaaccaatcaaacacggtgggcgctcaggctggactatcattcacggttgaaggaactagtgatatgactagttatacaccttctgttaatctatattgcacgagaacagctacttcagttcaatacagtatggccgattttgcgattagtactcgtagtagctctaacgctttgtcgccaatgacggagcgcatgcgcattacccaggctggctacgtccgctttggatcgacttcgagtacagctaaggttgacattacttctagcgcgaatttactaagcgggtcttggcaacgtgcgatgcgcatagctaatgatcagacaacgcctatcgagttcgaggtacagatctacaacgatgttgctggaggatctaacggcattgctttaggtacaatttcgagcgaccctgttcgctttatggtaaataacagcaccaaaatgtatttaaatgattcgggccgattaggagttagcaacacctctcccgaggctaccatccattctggaggcgaaatatgggctaacaatttgtatcattgcaagggaaacggagatggttcgctcgatatcgtttcaattggtcgcagaccgagtacccggcgataggaactgacgcaacaatcggggctatccgtattggaacgtgcgacgctaattataattggacagcatacgtaccagttcgtggcggttcgtatacaaacacttcggacgtgagactgaaggcggacattgtagactgtccctatggtttggcgagccttatgagaatgagacctagaaaattcaggatggttcaagagcacactacacacgttggattcatggcccaggaaatgtatgaggtcataccagatgctgtagagagaggagccaacgacgatatgaaccaagatggatttccagtgaatccgtggggcgttgatctcgccagtttgacctcggtactgtgtaaagccattcaagaacaacaagaccaaatcaattatctcaaagctgaactcgataagttatctctgagtaatatatatagcaatgggttgcctaccaagtaaagagctcaaaaccaatttaactaccgatgaaccgcgtcagattgtcggatcgacaatgctccaagctgacaaaattattgttcttggagattctgtgttccttcccaccaaaacccccgaaggagagtctgccatacttgaggtttctatcagcgacaaaaaaattagcctataccgcggatatcgcaacaaacttgtgagaaacgggatcagtctataaactaaacgttttgacagtatttggcttctttttttttgggttggtaagcccagacgcgaccaccttcagtctgagttgaggcatctaccttcctgatggacttgtcgagatcagtagcccaaacagctgcctgagtcttctgggggcgatcatggatgattaggttcttcatgatagctttcagctcagcaacgttgagatcggcgttatcgccatagctaccaccagaactggaaataatgcgtggattgaagaagaacattgtctatattaccaaaaatattataagagacgagtgataatttgcttaaactctttatcatcgatcaatcgattgctgtacatatcaaccgtgagagacttaagttgcttgatgatacttgggttgtcattgcctaattccatctcccctttcagcttgtcatactcagctcggagtgtctctaacggatccgtgagcttatcgtggaaattatattggagatgagtaatagctaggatttccttaaatagtttcttatcatcgatgctcagcttatcgtaagcggcttgatcgatatgctgcttatagacgagcgttttaatcatagattgaagactatcgctaatttgacatttagggccacatttacgtcgatttggctgcacaatcacgagggtcttagcatcgaggtcaggaatacggatatatttactaccgagctgcttgtaggtatatgcggatggggttgctaatccttggatctcatttaggttatatgtacgcccgcgtcgaacgacaccttccaaaggtgctacaccagctcccttcaaaccacgcccctttagctttctcttaacgccgctaccttgcggcaaatgtttgaaatgggcacgggcattagcgcgctcaatcttcgcttttacagatgctgataaatgagtatcattagaacccatttgatcaacctcgtcgcgttcccggagcttatcgttataagcacgaaccttaatcgagtaggctgccttggtagctttaacagcggatcgcgatgctcgtaccgcctgcttatccgcttctgagttagatttattgaaatcactacgattcttctccaactgactataagcttcaccatagctttgaaatgctgcttctgcttcgtcatggagcttttgaagctcgtcataacccgaatcgtcgtagcctaaaggtgttttgacatcagaaacgttggtaaagatcgcttctcgaagaaatcttaggttatcatcgaggattttttccaaattacgatcttctgactcttcaacatatttcacataatcctcaaggtcagttagtagagattcaaaagtatccatccatcgaatagttttcattaaatgagacatcgcgtctcccttaacttgcttgtggtgtccatttctaaaatttaatggttttgtaggagatggtacccctagatagtagcttggatgaactttcttgattgtttttgactcgacaattggacgcaaccttactgctatcttcacttgattttccgcaagcttctgataatactcggtgagaatggttttagcatcgatttctggaataggaagatttttatccatgtattcctctctaccagtctttataccaggtcgttcattgatgatattctcagctaattcatatggttttacttttttctcattagccattccagtattggacactaaacttagtcctttctcctcggtaatggacaagaaccgttcgagcgtagcaatccaatcaacatccttttgaacagctgggtgatgcttgtttgaatctacaccaaacacgtcaattctaaaattgtcgtcgatccatagatatccaccgcgatactctttaccgttctttagaacaggggttatttgtctttctagtttattagctaaaagtaagtttttattctgaatgataaaccatgtcagtttgtacttagcttcatcatcgttcaacttagtagaagttgatttatccaaaaacttcaaatcaagcctggggtcttttatggggatatcaaggtcctcaatgtcatcttcccctttcctctttctatcagatcgtagtggtttgtcttcactgcgcattgcgccaacttcattgattgaattgctgtcaccgttatagaaaatatctcggatttttgattcagtagcaacccaatcaaacgagtcatatttttgatattttcgaccagttttaaccgagcgaatagaaccattttcgcgaatgactcgctttttgtcatcactaccatctctctttacagggttgatcccaattgacgcccagttaggattggatttaaagaatgctttaatccaattccttgatgtgacctgatcttctctatccataattgctgtattcgtagaggtctcgatatctttcatcctcacgctattgtcaattcctacattagcgattgtaggtttaacactgatcccagcatcactcatgctaggcttagcagtagctgttgcatcactcgtatctggctttacgctaattccagtatcaaccatcacaggtttaacattcacttccaatgggtcagtattggttcctgttgttgataactcagggtttatttgagagttttcatatatcaaagttttttttaaggtctcagctgactcggatgaatctgtctgagttgttgctgttgttttctttgggagggtagtaatctcgttggaaatatcagaagcccacgaggctccttcaaacatcaggcgcttagcttttgcttgccggactcggcgctcagctcgttcgagcagctcctgtcgcttttgctctctctgagcgagggatgagaaatttggaaacattccgatactatatgttgagaatcataaaaaaatgagtctcttaattacgtttctaccagtagcttggcataactgaatcatgtcggaatggttgatatgtatggcaaatccgatttcgctcattgaggagattgagatatcgatccttgatacaatggaaagggacaccaaatattgcttccaattcgtgtctatattttcgattgactaccgttttacggaaattagctgctgcatcgagattaagcaactcgttcttgattcggctcacttcttgaatgatccagagcttgcgtcgaagctttagaagctcatgttccttttcggtacaatttgggcacattatttcgagatcagtgtctatacataaagtcagataattcaaattatcacaaaaatataaacaataatatatgggtcaaaagcttacggaggatatctccatttaattattataaagctaattatggctcatttttttgcgcccaatacttcttttcaagcgatgatcttctgtttttgttgatcaagcgcagattgtcttgctgctcccaggagtcaggctcattcccaagccaccttatgagatatttgaacttcccagaacgcatcttcttgtgatccaagattttctcagcctcaagaatgtcgcctcggctaatagtagcatcggttgtctctgctttaacaagtttgagatcgtttggcgccttgtagagggtatgaccattcctggaacgaatttgaactcggtatccatcgattccgacgattgtatagacagctttgctccatcgcgcggcttctttatcaaatgattgcttcttaagacgataatgtacgtttgacccaacctcaaactccttctcaattctatcggcctccacttggttatgtgtgagatcagcatccataactttgcctttggcctgattcggagtcataccaatcgaacgatgaaacgtgctgttgtagttttcgattacatctgcgatcagcttttgcgtaatccgcttgggagacattttagttagtctctgctttagcgtccggttgaaacgctcaattttccccatagtaccatgatcaccgggttcgttgttgtagtgcttaattgtcttggatttgaagaatccttgagcctgcgagttcatgaactcgctaccattatcacttgtcaggatatcaactttgtggaggcgaacaaacgctttaagtgctgctaaaacggttggcgcagtcttgtttgacaagagctttgcgtagcccaaccttgagttaatattgatagctgtcaaaattggtcgtttctcccaaaacgcaagatccatttgccatgagttggggttatgtgaagcaattttgaatccatcgaatcgcttcttctgctcctgaaatcgttgaatatcagcctgactggaataccaatccttcacgattttgagagttatttgaggatctatctcctttgccttctgatacagagcttgagccccgatataaccggtttttgggtcatagtagagttttgatagtagatccttccgtagctcagacatgatcctatatgataatagacaaaaaattaccccagtcggtagttgcttagatatgaagtggctcagtcgtgataccatcctctaacactcgacgcttgtcgtagtagtaattaagggccgttttgttttgcgtataggttatgatagacttggtttctttcgaaagtcgaaaacctttgttggttccttgaagtgtgatacggtccctcacaacagtttcgaatccgtcggggttaagtacattttcattgcgaccgcgcccttgctgcacacccttagctgaaaccttgaccttgtactcagcgtctggtaggtagcaaatgtagtttttactcgatagtgagaccatagcatcacctgaccattcgtccttgaacaagccaggggtgcgacgatcaaacttagccaccttagtattgtagtcgcgtggaaaccaatcgtatttatgctccatgaagtgagcgcgtagttcaggcttgatacaatcctggaaaggattctcacagctaaatgcgatataagccgaatcagtgtccatctcctggtactgaaagtcagagcggctaaagtaaaaatctatacattcgtagtagaaccgaagcatccgtagcttggcgagctgatagattgcaatagacaaatggatggggttcttgttattgagtcgccgtttcttcatggtgatctcacaggcgtcattaagctcctcgagaccatggaacgtaaaatgttcgatcttgtttttaatagctttgtcgttcgactcatacttaacctctttgtgtttgctcatgtccattccagatcgaccaaaagcactgttgcctaccagcttcatcatctcagcaatcatagccttagacttatcaacatcgccctcgcgccgggcattggatacagcctccataaagggggcaaaagccttatgagagctggctttgataaagcagtaagtctgagtgatctacatgccgtgagaaagataccacttaagcaatggtgtgtaaataagaattttttcgccaaagtagctaccgatcagcttacgagctggctttgctcggctttgcttgcgcgactcgttgtaatcaaacatatgcttgccaatcacactctcgtcagcacaatcgattagaatattcttaaaaattggggtcatctcactgaagtagtcttttaggtgtggcggggtacgaatatcacactcgaggaaaccaaagattttgtcgttgataatgtcatcaacgatacccggatatgcatcaatggttgtcaatcgaccgcaaggcatctcattaccaagtgcccacagatatagagcgttcgcgtcatatccgataattttcttgcagaccttacctccgcgaatcttcgtctcgttgcgcttagcatagcggttgaagataatagacggacctccagcgatgttggccttgatcttagcgtaaatatccttctcctcttgatcaatagaatacaccagtctgttcgagttgaactcaagcaacttcatatatcgaaatccaccaagcgatatatccttacgagctgtgttgcacttcacacagctgatcaagatgttgccatcgatgtgtcccagcttattgttgatacgatctgctgaagcaatatcagcggtaagctggcagtagcatagaccacatagatacttttgcttttgaagcaacgtattcaaatgcagaagtgtcataccaaattgtcggtttgccttagcatcctgactcttgtatccacccaaacggttagctggaaattggaatgctgaggcaggtttcttatccggatattggagattattgaagcaggtctgatacatgaccttctccgaaagaccaggtagcgacactccatcagcaaacatatccagattgaagctcttaaagagttctcgttgagcattgatagccttgatgaatgggactacatcgagattgttgtaccagatcagtagatccttcatggacttcatctcatagtactcccatacgaacttcactcgttcgtagtcatcatcggtgatgctagttccacgaagcttgctgtcaaaagctgacttaggtggtaatgtggtctggtttagtacattgaaggaagtgatgtactcgtaagggaaaagtcctttaccaagaccatagacacatctaattttgtcatcacatttgcagccaccgaggtatgttgtgagatagttttcatagctggtaccagcaggtacatagttgctaatatcaagcattttcatgttcgatgtagcaatgcacatgtagctggggttcttaatgacagatttgatgttgtcggtaccgataacggcaaacaaatccttcttaatcaagttaatatcgtaccggccagaattgaaaccaaatactggtacctgatcaagctgctgtttcagtttcccgtaatcagacctttgctttccaaaaccaagactactatggaaatcaaagaagctaccatacttaccttctttaatccaattcatcacgtcagtcatgttgtacttcttaccaagattcactcctggaatttccataccggtcagaccgtgagcgttgatgattttctgtagaagcgatcggtacttattgacatagaaccgctggatctttacagatacatcaccgatgtatttgaacatatccacaagtagcatcttcggatcatcattcacaaagcaacgcacctcctcggttaaactatcagctactgatacagacaacggaatgtgctcgttcgtgaagacagtattctccccgtgttgagtcgcagtaggcttaagaatggtctcaaagtcatacacgatgaagtgatcgatgtactggtcagcatctttgaaagaatacttcgtaagcagtgatcggatcgtgttttgagctggtttgtaaatagttggctcagctgggaagctttcgatattgacgagctcgcactgattctttttgtggcttttaaccctttcagcgcttacgaaaaccatttcacactcaggacattgatacttagcctgaagcatatcgatgttcttgatgtaaagagcatgattctcgaacgataaaatatccatagcttcataccccttgtccgatctacgaatgcattctacatttccagaaactacatccatcttatatacgttaataccaagttggaagcagtcttcaacctcatcgagctgtagtaggtcaatgggcttgaaactcctaaacaggctcaacaaatattcaacccccttgaaagaacagtagcgcttgaatgcctccttcacctgagcctgaattcttcgaggatccttcttaggactctggaatgtatgccaggcgatacagtggaagacgcacttgttgtttgtcttagggaagttaattacgtgcttgttttcgcggataatcttaggaataatagcctcactatctccgagagaatgctcgcgatggtaaataaaaatcttgaacgcagtgattgacttaagcttatatcccgagctgggataatttagtttgtcagccaactccatagaacggatttccgaaataaccttctttttaatatcaccccgactattgatagcgatggggttattaaatacataagtattagctatatttgggtaaaagtagcgagtatcgtcaggatcggtcttgcatacaagttcgtacccgagagcaatatttaccttaaaagcgctcgtttgtgtcgaaagaacgttctcgagcttgttgtagaaatcagatggcccgacaccctcatataggtgcgattccatgtgattaccgttgtaaaagcggtacttaggatcagccttgtagtcgggcgacaagtgtttttcaagggtttcaatcgaaacactgtactgcttagatactaatctcttgttgattggacgcgaaacgttgctaacataaaccatcttgcccgttctaccacgcaccttaacacggtagctactaccccatttgataggttggatatttaatctctttaatccttcgagttcgtatgcaaacatgctgcctatatatgcttgactatattattctccgtagatatgactttataattatttgaccttgtatcaggatcgactttatatcttagtcatttacaaaatattctgaaattaattaattcaaatatttggtttatacctttctggaggccattgtctttgactatattgggattgactttttgagtaaaaaaaataattaatcaattaagttcggtttcattattaagttcgatttcaccatcaataagttcggttttgggcttacgcttgcgagctcgaatctggtctctattcttgtcgtcgtagctcttttgatacgacaagcgagcgtcgcgtgtgcgctggtagtagcgctactgtgctgctttaatgcgctctttgttagcgaggtattgttcaggtgagtacgtcatctttagtatattactagctttatatttatcagaaacaaaaattgttttagtagcaggtttatgttgaaacaaggttaaaagaaggatgtgcggacaagaatattcacacgatactactttggatttacgtttcctgcagctgctagaatcacaatgaaatcaagcaccatccgaacgaccactacttgaacgagagctacccgagaactcatcttcatctttcacttcgaactctgtcggttccgacaccacgcttgctttagtcgcaatatccttgtatcagtcgactcgatcacaactgaaaatggcatgcgggagaatgatatacggtttccctttgctagttgtgggaaccatgccatcgtgaatacgccgatttgtacgtcgattcaaatccttgaggccattccactcatcctcggtgaagtagtttggtaattcaacaccggtcaactgcttccctctcttcagacgaaatccccagtcattcttttggacagcattgaagacgtcaccaattgtcgggacatcaccataactgcagtcaaagtcgtacaacttggcgagagtctgcgccaacgcatccaagaacttgcgacacgaagcttcggtgctcattcccttgtatcgtaattgcttcttgatagaagcagcttgctgctgatccggaaccttcaccagcacgtgaatttggtccgtggatggcttccgcatgccagtcaacactttctgtaggccagactccccctgtagctcctcctctttgcttgttaaagcctcaactgcaacagtcttctcgccttcttcagcttcttcacatcttctgagtcggactcgagccacgcaccgccctccgtcttcgccaggaagagctgcaggtcacctgcatcgatgtccttcacttttgttcgtcttctccaccttgatcgccttcttcaggtcatccaccaagtcgctttcgtccactcgcaccgagaacgcgctgcccgccgcgccaacgatcgcacagcagagcttcaccatctttcgtcgagccggcagattctggaatgaggaagaagggagggagaatttctggcgtacttaagcgaacatgaaggtgtgtgccatagattttcaaccaatgatgagacgccacgtcgcgctggtccgaactactagtaaaatctgccggcgtaatgttctattggttttatcaatgtagtttgaacgagcggtcccgaaacgccctaagatccaaaagacgtggctctcgctataaagtgggcgtcgtcaaatcaacgtctattagatctgaccggttcagaggttctaaaactaccctcatatcgaaaagacgtggctctcgctctcaagtggtcgagaggggtcgtcgttgaaatcgctgctgtcccgaaagaaggtttcaggaatgttctcggtggtaaattacggtaaggaaaaaaactgccggcgtaatgttccatgacccactactggcctcgccggtctcagcgccgccaacgaattgttgtcgtccggccacttcgacgccagcgacgtgtgcgtgctcgaagcgcagtcgcgcatcggcggccgcgtgcagaccaggtccttcagcgactcgctccccgtgaacgtggaggtgggcgcggcctggatccacggcgtcgagggcaacccgttcgccgcaatggccaagcagttcggcatctcgttcaaggagatcagcccgcggaatccgtggctgcacccgggctcgtgctcgaacttcctgctgttcgacggcagtcaccaactgagcgagcagcagaccaaggatgcgtgggcgtggcaagatctgcttatgcgcaagctccagcagctcgcgaggtcggaccacggagacgcgcaccgagagaagacgctctcggctgtggtcgagcacctcctcggctcggaccgagaactgctcgaggtcatgggcggagtcaaggcccgcgccaagatcgagctcttcctgaggctgatggaggcctggttcggcctcacagtcgaggaactgaacctcgacacgttcgtcgagacggacctcatgggcgacgaccccggcgcccactgcatcgtccccgcgggcatggagcgcttcatcgaccacctagcggagcccctgcatgacgtgatccacaccaacgtatccgttgcgtccatcaactacgacggcccggatggggtgattatcgagtgcaacggcggacgccgcgtcacggccgaccgcgtgatcgtggccacctcgctcggcctcctgcagagcggcaagctgcacttccagccggagctaccggccgtgaagaccggcgcgctcaagcggtccaagatgggtcagtacatgaaggtgctggtgcagttccccgaggtgttctggccgaaacacgccacgttcatggcccagctccagaccaagagctcaagtggaggagccaccgacaagcggatctacttcccgctggtgttcaactaccaccttgctaagggggtccccatcctggagggcgtcttgatcggcgacaacgccagcgccatctcggcttccttcacggacgaggagatcgcccacgcgctgtacttgcagatgcaggagacgttcggaccgggcatccccgagcccatcaaccacttcatcactcggtaagttctttagctagcggattggataccttgagtcgtcatcgctgactgtattgactgtgttgtggtttggccagttgggatcaagaccagtggtcggtgggcgcctacagctgcgtcaccgcgaggaatgcacacgaggacccggacctgctgaagcaaacggtggcaaatcgcgtgctcttcgcgggcgaggccgtagatcccaagtaccagggcgcgctccaggccgcctacttctcgggactcgaagcggccgccgagctcgtggcccagaaccagtaagttaaacatataagttagagcccgctctctcaaggagcagctcaacagcaagtgtgaagccgcacacccgcgattaaccaacaacaaacctccgtagtgtaaacgaggaaagctccaaagcattgggatcctcagaaaagtcggaagctgataatgcatcccaaatatgtgcccaaatcgccccaaatgtcccaaataatgaattgtctgtaacatttaggtacatatttggggccaagtaaatggctgctttctcctaaaactatcccaaatatgtaccaaaacggagttgactgattatggtctatagtctatgggcgagggcgagtggacgcgagcgcgagcctcactcgatgcattcactaatcgccaacacccgccgattaggcgggggcgtgtctgtgcgagcgagcgaacgcgagcgctgcaacccgatttttttttttctagacaccgcgcctggccgagacgaggaacttagcgtaagggacaagggggtggagcaggccgcgcagcggcgccccccgagcgaagtgagagaggggcgggccccccgcagacccgtcgctaagtccgcagacgagagccaacgcgcgagtgtccgccctgtgctgctctttcatactgaaggttattctgtcctaaatatgtaccaaaacgttcccatggtcttaaatcatttgggaaaaactttgggatttggggcgttttcggggtgcattaaaaagtcaattaatgttaatgcagccccttttcgctgtacgatcgagagctcttcaacctgatctacccaccttgacggctgatcttgagacacattgaggccgccaccatcgcacgtgggtaaactcagcgcattggcgagaccgacgcagaaacaggcatggatggcagttgacaatcctcgcaaggtctcactttgcatttcgtcgacaagcttccaaccaccttatccaagccccaagatggcctgcgttgcacccgactcgctccaagctcgactgcgccgcggagacattccttgccgcggcgtgaacctcggcggttggctcgtggctgagcactggatggcatgggactcgtgtctgtggcacggcgtgcccgacatgatcaagaaccagggcgagttcgcgaccatgaagttcctcggccacgaagagggcgatcgacgcttcgacgagcaccgacgcacatggatcacggagtacgacatcgccgagatgaagcgcttcggactcaacacggtgcgggttcccgtgggcttctggatcatgggcttcgacccgacggacttccccaacaagcaggagtggaaggtgttcgctccccacgcgctgcactacctggacgagctggtgaaccactggtgcgtcaagtacgacctggcggtgctcgtggacatccacgccgccaaaggatcgcagaacggccgtgaccacagtgccgcagtggacagcggcgccaagtactggagtcagtacccggagaacgtggacaacaccgtgtacctggcgaacttcctcgcctcgcgctaccgctactgcccgtcgttccttggtattgggctgctgaacgagcctgaagtgcccactgacccgaacgtgctgcgtggatactacgagcgagcgtactcggagatccgagctacgggtaacgactgcgtgctcactattgcgccgttgctgactgagcagagtccgccctttatggaggatttcatgcgctacccaaagttcttcaacgtgtggcacgagtggcacccgtacttcatctggggctatgaagggcagcgacgtgagcaagtcctggacgcggtccgtcgctacggcaaccagatctcgtcgtggggaggcaattggcttctcattgatgaatggagtttgggcgctcaaggatgcgccttccccagtgaagaccgccatggactgcagcagttcgcctcggctcaactagaagcatttagcaaggcgcactcgggctggatcttttggtcttggcgccactcggacgacggacacaaccgtccgacgggctggtccatgcggcagttgttgcgtgacggcgtcgtgaggctctatgaagtctaagtgcgctggaagaatggcacagtgtttttggcgtaaatgcaaatgaatgtttggttactacattatcatggattatcttccttctttacttgcatacacacactttgctgattcctttgtcatgcacgatacttatccagcgctattagcgacgctatgcctccaggctcaggtcgttgaactggactcgcgagaacttcttccagtatccgtagagaagacccgcgagtgtgacaccgacaacgatcagagcaggtaccagcgtaaagaagacgtccacagcaatgtacacgagcaacgctgatgggatcaagaggccgagccagatcatgggcatgcttctaggcactgcaaaacatcagacgcacaaaatgagactcaagatctaaaaaccagtcgtctccaagtaatttcttacctttgaacggacgatcaagttccggctgcgtgtagcgcaacttgatgaaggcagcgaagatcaggagctggtagaaagccgacagcgcgttggtcatgttgagaatgtcgtcgaagtcgaacttgatgagcacgaagatgaccaaaagactggcgaacacggcgttgtctggcgtgttgaaccgcttgttgcgtctacatcaagtgaaagcatttagtcagacctggttaaacttccaacagagtagtagcagcactcacgctttgaggaacgctggggcgagtccacactgcgccatgcccataatctggaacgagtcgcagaagagctccgcgatgtacatgcccgcgttgctgccgaaagatgccagcatgacccacgtggacaggaagtctccgcccaaatccgatgcgatactcgaaaacgatccgtcttcccaagtcgtccaatgtggcgagttgaagaccgtggcgccaaacagcgggatgatgtaagtgagcgcaatgagcagcaccgagatcagcatggcccgtgggtaggtgcgcccggggttgaccacttcgccgccaaagaccgatatgccgaccgcaccgttgaaattccagaagagcgtgctgatcaaggtggaccagtcaatctgtggcatcgtaaggaggtacaagttagccaagcttcataaccagaatacgcgagtttgggttagatacaggtacgtacgtccagactgccggacatgctcacaaagtctccgttggcgtcgtacacaatatcagagcgacgaacttctcccagcgcgctccagtcgtgtccactcacgagtccccagacgaagagcacgatgaacgggaccatgacgaagacggacaatgtcgccatgccgttgcccacgatctgaatgccgaagagattcggcaacgccaaggtgatggcgatgatagccttgatgaagtactcggccgtgggcgagccgatcgacccgtagacttcggtaaacgtagcgacagcaagtcccgggtagatggcgttgtcgatgactccagaaatccaagaccaataccccgtctggaaggcccagaacggaccaaaggcgtgcaacacccaaaccgtgtagcctcctggaaacacaacgacgagtttccattaggctgggcggtttcgtcgagaaaggagctcgtggttattctcttaccgtcgtgtgggtacgcggtgctcagctcagccgtgacgtacgcgatcgggagtccgaggatgaacgggaacaagacgaggaagattagcccaaccaacggaccaccggctgcgtaacacaacacgatcacgacattggtttaacgaccgaagtgtcctcgtatccagaatgctgaacaagaagttaagtactacttacgtatatcttacccgagatgatgtactcagatccaatggcctccgcacaccgaaaagtagcagagacccacaatgcccaagaccgtaagctgtcgctgcagcggcaagtcctccttcgtgggctccagcgccgacggacgccattgaacggaagcgctcatcgagctgacgatgctcacgtacgagtgatcgttcagcctgtgcacgtggaattatcgtgttagatggctgcaatccatggagcggacagtgtgatcctcaccggcccaaacgctcgggcgtaagcagaagttggtcgtcataggctccacccttggggctgtgaacgacgttgagaatgggtttcttgggctcggccatgcggatgtggcggcagtgtagctccagtgcttgatccaggcaatgagaatttgaaaatgtgcttcaacgtcaacgtctaccaagcagcggtgtctacatagcggtactgtagcccaggaaaaccccttgccttcaatgtactgtagtcgatacgctgcaccgccggtaggtccagtgttcgtgatgatgttacggctcaaatcccatcagctttatttcgcgtattcataacggcatcccttggaaaccgagccaccgtagagcagctcactggccccgttgggtgcgtcacgctgatctagcgactcgtttaacgttccgtatcaacctgcgagcgtacggcgctgcaattcctccgtccattgacgacttcaacgacatttaactccgcgtcgcctatgcaaaggagctcgaagcgactatcgaaacaggggtctttgctttcgtatacgggctcgaggcatgagggtgtaatcgtcgagcggcgaaaggtagctcaagttacttagggaacccaggcatttcgagtttttttttccgatgcaaacgaagcgtgtcctactccgtcctaccggctcaaactacgagtgcgcagttggagaagcatccagccgatctggagcattgcacaatggagactttgcccaatgagatgggccaatccatctgattcccggcgttgcattcactgactacgatgatgcggcggtacatgtgcaagcagccagtcttgcatcgccgcgtcaattgcgatggttattgccgggtgaacgacgaaggcaagcgtcctctgcgtttaacgcaaaggcgatcggtgccgacgcaaggctgcattctaacgccgctcaaatgacacgacgtaacattcttctccacgtcgagtgtcgtgttgaagttgaccgagtgcttgaagcaccctctctactgcaaatccttgcttcctgcttctcacgagctaagaggggatgaaagcaaaacggcagcggcggagactgccacatagaagtacactgactcgctcgcgtggtgcacgacacgatcgatccctgactcacgcatttccgatgcctcatttagggtattgacggtacagtaaagtgcgtcgataaggaacgcctgatatacattaaaagaaaaaggtatattgagaattaaaggtttgactcgtcacatacagacagcaaatgcactgatttactgcaatatgtagttcatgtcggacttcgcgaccagagtctcgccttgagcccacgcagccagctcagcataggtagcacccggtagatcacgacggtgatgacagattagcagcgactgaagcttggtcagacgtagccgcgtctggaacggtctggaagtggcggtcaccatgggagttgtgagcagcagagcgaaatttggttaatgagacacgcagacatgtacctggcgcgactagcgctctgggcacccgctacgcgggcgctttgaccccgggttgctggaatagcatagcttaaaagtatatgcatcattttgatttccataacaataatgtgcggatacagttgatacatattcgttgctataacttcgtgctttagtagcaaatgagtaggaatacattttcctatttagctaattaccaaatgtcgctcacgatgcaaagttgagtacctaaacatcgagtgagctgaatatcgttgccgttgtattattgatcacccgtttctgcgaggcgagctacattgtcacggacatgtcttactacagtgtagtgacctgcgtgtttacttactttgaagtaataactaaagtattgaaactatgattggatgtggtttatactgcgttgcaaactggtagctgtcgtcgataccgtactctagtgttgttaatacgttagcactgaaagactgcaactttgccagcatgaatttacgcactgcaccgcgctacatgtagtaatgctggtttgcgcgataacagttcaaatagacatagcaaatttagctcaactcaatacggatcggtagcgactgtgcgtcttcgatggttaggttgttgtgtatcgtgtatgtgcatatgaagcgtttggcgggaccccggggtccccgcttgccccgccagctgtcataagcaaccggtatattcggtaaattcaagtgctgcatgtttgtatcgatgctatgtatctctggtagtatcgaagctgcagagttcgcaactttgcgtgcccgacgccgctgctgctgtagtaggcgctagcttctagcagtcagcttgaatcttcttggtcgtatcttcaccaagacgcttaacagaacgaacgaatgcagcagctttgtggtcacgacgatttcaatacttaactatcacgtttgcgccgaggaacctctgcacctccagttcgcctagacttcatactggatgctagatgcttgaaggtgaaatgagctctagctaaactcgaaaaattatcacaaaattgtcacaacatatatattatcactgccccgccgataaaaataaataattcctgtcgccatcggtacatgatgcgggaccctggggtccggccaatagcttcatatatatattgctctaacgacaatgtctacactaagctgcattatgtgcatgctgcagtagtttacggtacacgtatctagggtagcagcgcgcatttattttgaaagctgcatgcgttgccagtgtcactactattctacgctttgcctactctgcatctttcatctggattgataacgcgttattgcccttggtgcatggcgtacagtacttagtaacagtaattcgaaattgcgcatgaccatgctgttgtgcgctgcgcgcaattcgagcaacattttctaaaattgttttgttgaagcgcgagagttagggcacctgggatatgatcgattttgatttgagttggagtgcattgttgtcacttggctgatgcgactatcgttcctatggaagcgagtgtcggattgcagcaagatcctgccattaatcagcttaataaaaaatataaaaagtcataagtatgacgcctcgatgcgcgcgctggtgatgcacctgggtttacttaattcgaccaactactacgtagtagtaacttaagttgagcacgcgactactcaaattggtgtattataatgcttgattcctgcaaatgaatacagcacgattgccagctacaccacgccgcgtgctgtttatcagttcatctatgtgcagcgttaggtggtctaaatgcgtcgttcgcacacattcttggtgtattagaagatgaacgcctaataagcaccagtctacccctaattccgtactgtaatccatcgactgccctgaaggtaccagttatcccaacaggcggaactcccgaaaccgcaaagtagtttatttatgtagatgtatgcatgtactcactgtagcagtgtccgctgccgctgcactccgctgctcactcccgtacgccacgcgccaactttcaaaatgggggatgtgataatcacacccgttaaagtccgattatttccgcgtaagtacgatttttagcgtgattgtgtctagttttgtaatttcgtaaatagtttaaaagccagtgcgagtcgacttgatgagtgaataatgtatgcaataaggccgcggtagcgtagtctaattgacaggtctaggctgtaggggcggaaagcgtgacgcgatgaccgacagaaaggattctcggttagaggacggagaattccggcgcttacagcgatcctcatgattccctctcgcgacctttagattcctcttgaggctcggtttcggaactgtgattggcggaatgttaaacgggaccgaatgattggtagaatcatataactaattcagtacatttggcactcaatgggtacaagcgaggattcgtgtcttgtcgtagaatataaaacgtcgcccgttccttatcgacgcactttactgtagtgcttcgagacggcggacactgtgcatggtgcacttgggccccaagttgcacagtgcaatcccatgttcaacttgaagtgaccatcactcgttgttgaagttgatataaactctgagttgaaatgatggaagtcaaggcgttgatttttgcttgcaatatttgtacttactgatagattcattagcttcgcggggcagttcactatccctccaagctcaggtctccgaactgcgcacgcgtgaacttcttccagcgagcgtacaggaagcctgccaaggtcacgcccagcacaatcagcgcaggcaccagcgtgaagaagacgtccaccgcaatgtagacgagtaaagccgtcgggatcaaaaggccgagcagaagcatcgggatgctaccaggcactgcacacaccaccacaaacgccaatgttagcaaggcagatattccaacaagtagctcaatacaatgtgcggcgagagcgtacctttgtacgggcgcttgaggtctgcgtgcgtgtagcgcaacttgatgaaggcggcgaagatgaggatctggtagaaagccgacagcgcgttggtcatgttgacgatgtcgtcgaagtcgaacttgatgagcacaaggatgaccacgaggctggcaaagacggcgttgtgaggcgtgttgaacctcttgttgcgactgcaagataccatccgtattatgctgtcagtctcatcaataccacacaacagtacagttaaaacacaacttacgcctggaggaaggctggtgcaaggttgttctgcgccattcccatgatctggaacgagtcggtgaacagctccgcgatgtacatgcccgagttgctagcgaacgaagccagcatgatccaagtcgagaggaatgtgccgccaatagccgacgcaatggccgagaacgatccgtcgtcccacgtcgtccagttcggcgagttgaacaccgtggcgccaaacagcgggatgatgtacgtgagagcgatgagaagcaccgacaccagcatcgcgcgcgggtaggcgcgtcccggatcgctcacttcgccaccaaacaccgacattccgactgccccgttgaaattccagaagagcgtgttgatcaaggtcgaccagtcaatctgtggcatcgtaaggaggtacaagttagtcaagcttcataaccagaatacgcgagtttgggtcagctacagatacgtacgtccagactgccggtcatgctcacaaagtctccgttggcgtcgtacacaatatcagagcgacgaacttctcccagcgcgctccagtcgtgtccactcacgagtccccagacgaagagcacgatgaacgggaccatgacaaaggtggacaagacaaccatcccgttgcccacaacgcgaatgccgagcaggtttggcagcgtcagggccacggcaatcaccgccttgataaagtactcggccgtcggagagccgatatctccatagacctccgtgaacgtcgacacggcgagtcccgggtacagcgcgttgtcgatcacacccgagatccaggcccagtagcccgtttggaacccccagaacggaccgaaggcgttgagcacccacaccgtgtagcctccgtcttccgggtacgcagtgctgagctccgccgtgacgtaggcaatcgggaggcctaggatcaccgggaacagcagcagcatgataagtccaagcagcggaccaccagctacacgacagaatgttagctatatcctctcacacacagcagccttagcattatcaacctcacgtaccggagatgattggctcggatccgatgggtccaccgcacacggagaagtagcagagcccgacaatgcccaagaccgtgagctgtcgtcgcgggtcctccttcatcgtggccaacgccgacggtcgccactgcaccgacgcgtgctcccccttctcatcggggcccatggagctcacgacgctcacggtcgagtggtcgcgcagcctgcagcaagcgagcgccatccattttcatctgactaagcgtccagcgcattggggggagatacctgaccacacatttcccacctctcgaggcgattgggcgtcgacagagattggtcgtaggcgccgacgccgacctgcgggctctcgatggccgtcatgctggagctgctcgctgctcgccgcttcgcccgcgtccctcggcgagaggctgtcgattcggaagtgagctcggctcggttcggttcgaggattcgaggacctcgaagttcgcctcttgctgagaccgcacggaatcaagtgtaggtcgtccactggtcgaactggacgcgtcacggccatatggataaatatccgtgcgcccaagcatgctggaaatatcttatcagctgctggggtagacgaaggtgtgatggccagcagcttcttcggtatacggcgaattgcgcgtctcgagtatcaccaccgtttacaacagacctgcgtcgtcgatttagcagcgcgtttcccgatcagaccgacgactacgcgcgtgaatggaaacggatatggtgggttatgagcacagtatgcatgacagtcctatggacccaacgaaaccaagtggttcacaatgggggccaggttaccattgcaagcagcgtcgcagcattccaacaggctggactccggcaactacgagcactagcacgtagggaacgcggaaatccaaggacaatagttcaaggcacaagattacttatctgtttggatctcttccagcggacaccaagagaggcacctcgatcagaggcgagccacgtacagccaccgggatcatctcaggtaccggcgctgatcacctggcttaggacattccagacactctcataacataagttgaatagactagtctgaacctcctccccatatggataaatatcgtgacggtgccgacacatatgattttatacttagccactgtatggtggccatggtccaatcaaatggcgatgaccgattattatcgaatgagaagggcgatagatggtattttatccaatcatcaacgttaggggtaggtgtatgagccgccgacactcctgccgacgtataatgtaggcagggctgtcgagatatgttatccacctatagtgaagttaagtgattaggtgattatacacatattttgcacggtgccgacactttacttaaagtttgtatagcttgaatttgactgctttacgcagtggcgcttccgctagcttctcaaactcaaccgagtttccgtggcgatgccctttcatgaacttaccactactaagcactagtactacatgttagcagaacggcaaggcatgcgataagtagtatttgcaagtttcttatcgtgaagatgtacatgtaggaggaggtgacgcaatggaacacttgaataaatagatacttaattagtattaacggtttaactccagctaggagggcatcggggcaggtcccagcaacatgccacccagccaaccgtacacaatgcacccgcacgcagtggcagctctgcatgaccagctgcggcgccacgagacgcaccagctcctcgcacgcttccttgtgtcctcgccgcaggccactcgctcttcaaccgcaaactgcgccttcgtccccgccgccctcgccctctactgcagtcactctcccttgtccacggatgccagcaggcttgacgactcgagtacgccgcgcgctcacctcagccgtgccctctcgttccttcagctccgccgcaccctccttctccttacaatacgcggcagccgctccgtcgtatcccctctcctccacggctgcctcagcggtgaccgccacgctccttgacgcattgcacgacctcctcctccactgccgctcgctctgcctcccctcttcgactcctgctcgacctccctcctttctgcagcgtcatcgtggcctgcctcactctctccacctcctcctcctcctcttcctcctcctccccctcctcggccaccacctccaccaccgccgccgccgccgccaacgacgacgacgacgcccgtccgtccgtcgtgcccgtggagccacagatgtccttcgtactcttgagctcctcgccgccttcccccgcgctcttggtgccccccccggtgcctgctgcccctcgcccttgtgtcctgggtgccctggtcctcctcgctcttgactggctccgagggcacaggctgagcacgccgacgtgccgggcttgccacgaaccgaattgggggacctgctcacgcctgtgcacgcccgcatgacacgcacgcgaagcctggaggggagggcgtagcgcaggtcacggggcgctcaggagcgccgccattatgaccttcaccacgaaatgaaaatgcgagaagagttcaaaatagccgttttagaccaatcaaagaaattcaggctttcaaccaatgatagattgtgtcggcaggtgtaggccgctgtcggcaccgtcacggccatatggttggcgtctggaccgcgaccgcctcaagtcggatcatttaacagagctctccagtcttccgctacgtacagtacaagtccagcgtggcgcagttgacggagacgacgtccgtgtcagaatggatcccatgcatcctcagaggattcctctggtggaggatggaagcagcgctatccgagtgctcttggttgaagtgagaccgacgtcttgttgacaagcttgtcgtggggttccgaagcggcagcgattgggtagcaacggatcaagtattctgccgccggtgcaagtggtgggtagcgacactggactcgcttggggactgcaacagtgacggcgcacatacatatatatgtacatgtgctgcctgcgaccagcgaaaacattcagatgtacagcgttccgtacgctaagcgatgggctcggtctcgtcgacagcatttggcgttgaatgcgacggcgctcatgttctgcggtggatagcagcgatagatcgcatcgcagactgcgatgcgattcgcagtcgagcactgccgcagatcctgcagactgcacagtgcacggcatgcggcccaccggagatgggggtccgcccgatcaataccctgcggacgtccaacgtcgcgaggatgagcttggggtcagttgcagacaccggcatcccgccactatcctgccgccgcgtccggcgcgtcggccgtcagccttggcaactagacttggggaggcgacaccaacttttgccgccgtgtctcaacgcctttcagcaggacctcagcactggcagctcagctctatcagccacacgtgacctggaggaactctagcttggaactcgacgcgtgccttcggcttcacagtccccacgagcacttggccaagcctcgcgcccagtgatgggtagtacccattgggtacactcccctgtccgacaccgccgacgaaacaggcgcagattgaaggtgtcatcgccataaaccccgtattaccagtccgatttagccgcctcaaatcgcggccacccgtcgttctcaactcggcaccaccaaatcggagcttttcccttcagaggaccgaccgaccgagagtcgaccgacaccagggcgtgctagctctaactctctccgctctcctcccccctctcctcccttgggtcgccgctaatgccgcagccctccccgcgccttccgactctcatggcgctccgatctcgacgctcgcggctctggcgtctggtggccgacggtcgtggaacagcagcgtcgacagcaccccgacagccattgcgcagcggtgcgcgcggctttcagcgctgtgtacaggcctcaagtagttgcaacaatggcagcagtagtgcagccaacgggtggcagcaagtcgcggctctgagcgccgcggcgggggctttggtgctcgcccacgcgtcggaaccggacgccgccatggaaggcgccaacgctccgaccatcagacgcgggggcaacatccacgacgagtacgacatcctggacgaggtggtgggcgagggaggctactgcgtggtgcagaagggcgtggacaagcgcacgggcgagctggtggccgtcaagatgctgagcaagagcgagacgtccgcccgagagttctggagcgaggtggacgtgctgcgtgtggccggacagcacccgaacatcctgcagcttagaggcacgtacgagaccgaatactgctggtttattgtgcaggagctggcgcaggacggagagctcttcgaccatttgattgccaatggagcgtactccgagcaacaggcgagcaacaccatccgacagctgtgtgacgcgctgcagtacttgcaccgcaagggcatcgtgcatggggatatcaagcccgagaacgttctgctgcacaatggccgcatgtgtctcgtggactttggcgtgtcgtttcgaatgggggaaagatttttctacgactcgcatttgatgggcacggtggcatatgcagcacccgagacgctggaacacggtgcgttgattcacaggaggaataccagggatgcacttcgacaggcaagagccaatggggaaaaagtgcagattgatgagaacgaggacgaggacctcgatacccaagctggaccggatgccattaagttcggacccaaagccgacatgtttgcactcggaattgtgttgtacattctgctgtgcggcgcacatccgttcgacacgtataacaacttgtccgatgaagaggtaagttgcagactgaggctttgcgttgagtcagttgtatgttgctgatgtcgcttgtgtgtgttttacagatccgtaaaagaattctgaagggcaagttccgcacacagtctcgagcgtggcagtcgatttcgccgtctgcacgtgatctgatccagaagctgctggagacggaccctaacaagcgactcagcgcggagcaagcgcttcaacacccgtggctgcgtaaccaagcgcaactcagtcgcgagccgatgaaaaattcagcggagctcttggaaaaattccagcgcggtcgccgtcgcctgcgtgccagtattctcgctgttcttctgcttgatgcaatggcggacaacctggacgaggaagacaatgacgagttggaaaatgtgaaacgcagtttcgcctgggggctcagttcaagcgtcgaagcattgaacgaaaagacgaacgcgttgctctccacgctgcatttcttcgacaaggagggaaagggctttatctccaagaaggacctcgctcgtgtcagcgaaagcttgggcaagcatatgagtgacaacgagctcaacgagatgcttgtcggagcaactggtgacccagagcagaacgcatcgtcattagaagctgtcgactatgacaacgtgaagatgacgatttccacactgcggtcggctacgttccgtcctggcgaagctattatccgtgaaggtcacgctggcgcacacaacgtgtacttgctcttggatggcgaggttgaggtttcttgtaagaacccgatcaaaaagtccatgccgtcggatgaggcaggcgaaggcgccccgattaccagttcgtcggcattcgagcagtctgaaggatttgctggactagtgtcacgtccctcacatccgtcgtggccggggtttattcaaactcgacctaccacttctggacttgaggagatgaagttgaggcggttgcccaagggaacttttttcggtgagatcgagctggtccgccctgatggacgctttctgccgcgtatcgccacctaccgctgtgctgaagagagcaacacgccatgcaaagttctgcagcttgtggcggacgactacctgaacttgaaggggacgtacgagtcgatcaacgatcgcctcgagaaaactgcgcaccgccatattaggcaacatcttatcaagtgcgtggaggcagccaagggttctgtgaagatgcgcacgtttgacaccggcgattttatttacaaggaaggtgagccttgcgattcggtcttcatccttctggacggacaggtcgaagtgctgaaagcgaacgaaggggtcgttgtggaggagctgcacccgggtgactacttcccgctgggggtatcagggcaaacccgagcctgcaagattgttactcgtcactcaagtgtgcggtgtacgcagcctgcgaaggtggtggagattggtggcgaaacctttcgcagcttcttgagcagcaacaagttcttggctgcatacttccgcgaggaggtgatgacgcgagagcagcagcgccttgatcgtcttatgacagcttagctcgatgattcgagctcaaaacacacaacacaagaacgctaacggggacctttgagagaagagaacgaacgatgaagaaaaaatggcacatgtaaaacgtcgagtcgcgactcaaatcaatcagcagttggcggtcgactaaccaccgccggcaagttcattcgtcgctcttgtctggatccgggtcgacttcttcaagttgtactaataggtgtgcgcggtggggtcgggagggggaacgacagcgcgcgatcgatcgcagcgaggtcatcgcgcgtcaacacgctggaatagactttgtgtggggagcacgatggatgaatcgctgtgaatggatgagcgaggggaccgaagacctcgcgaagtgcgtgctcctcggcctccaggtcttgatcgtcacactgcaagccatcgactccttgcggaataacgacaagacccttttggagcaagtagcgcacaacaatctgcagcggggtctgcaacaccttggcgccgtcaccgagagcgtgtgagtccatgtgatacgaagctgctttgccttcgttctcgtgagctaccaggaatttgaatggccgctcgcgatagcgctcggacagatcgtgagtcagcgtatcccagtcatcacgcaactcttgcggctcaagactgtcaaggctgtggatggggagccgtactatcacatcaatagcgtgcgcgtgagcgaatgcagtgatgtcttcgagtggagcatcaagtcccaagaagtcggacgtctttcctggcagctggaccatcatcgaccaagcttccggtggattgtccgggtacgctgtgagcaggaagtcgacgtcttggacgctcaagtcgctcacgccgatgtgtcgcgccagtcctgcttgctggattgccagcatgtgctcccacgcctccagaacggtttgcttgcgggcgtggatgccgctggaccccgggagcgactgcgctcggagcaacaagacgtccagctgctggagctgcagtgtcacgagcgcctgctccacgcgcgcggccatttcctccagtccgcaatctgttggcgttgaagccaccacagcaaagtgcgtcctggacagcagcgcgtcctccgcgcacgcctgctgaagcgccaggcgtacagcactcaacgctgctccgtcctccagcctgtcgaccatcaccgccctgcagttcgcctgcgtcatcatctccagcagcaattgccgtcgcattgcctcgcctgcttcatcagcatcactgacaccccctcctatagcaaatacaagtctctgctgctcccggaacgcactgcagcgtccgtgcacccccacgctccacatcttgaagttgccttcaaccgtcacgttctgcaatgatcgcactgtttctatgtaatgtcacactaattcacgtatgccacaccatgtctccaaacgagaggctcctgatggctggcacacagacacatacacgctccgttatagcacagcaatggtgatggtgctggcgctcgtgcggaccgccgccaagcgcgtgggccgcgtgccgcagcttcagaccgtgcagggcgcgcgcagcttcgcgttccgcacgcgccgcaacgacgaagacgacgactcgttccgcggccgccggcgccgcaacccggaggactacgagcccaaggccgcggacgaggacacgggcgacctgtacgacccgtaccgcgagtacatggagacgacgggcgagcgcggctaccgggagttcaacccggacaacgtggacagccaggatttccaccgcgagtgggaggagcccgccgccatgatggaggacaagtcgtggcccgccaccacgggcacggacctgttctcggacctgctcaacatcccgagcgagccgccgagcggagagaagctggacaagatcctgaaggagtccttcgcccgcatgggccacacgggcaacatcaacgacgtcaagctgcccgagatggacgtggagatccccgccgaccacccggacaaggaggcgctggagatcatgaagctttccatgatgaacaacggccgcctcaagatggacgacaagaacgacctgctcaagtccatcatcgacgagctcaaccacctgcgcaacgacaagaccacgctcttcaagggcctcgacaacaaggacgaggaggagaagagcaagaagaagtccaagaacaactaagcttagacggttgcgcgcagctgggtagatagggtgcaaggtgcaaggtgcagtgcaagtgatcgaggtggaggcagctgcgggacaaggcggaacgttgtgtctgtctgtctatagtcggtctccaatgtttcagcttggcgtatttttcaattcaactgcgctgcatcttttcctgttcctctggtggcagcatagagacatcatacgcagttgatccctactccagcaggtggcatgccaaaagtgatgcatgcagcagaacttcagcgagtccaacattgcaccgccggatcacctcctatttttatccaatcccctgtctctattccaaacttctgaccaatcacaacgctgcaacgtactatccccctcacttcatctttaatccgggggcaataatggagtcgtcaccaagctcgtcgtcctcctcctcttcgtcttcctccgcgtcgcgacagcgccaaatatggtccagtcgcgtgcaccgcgagctggagaagtgccgcgcgtcggacgcgctgccccgcggggccacgctgcgacgcgcgcaggtgtcggagcgccgcggcgtgtgcgagggcgagttccactgcttcgtgcccttcgtggccggctcggacgcgctctcgctggtgccgctcacggatctggtcgtgcgcatgcccttctccgacgagcagctcgcggacggccaggcgcagtacccattcctagccccggaggtggagattcgccgtggagccatctacctcccgacggagctgcgcgagcgcagaacgcccaaagctgaaggagaagagcccagtttctggctgaagttgcccttgttgcagcactggagtccgtccacgacgctgccaatgctcatgcacgagctcttccaattggtgcagcagtgcgacccgacgccgaccaagtctccgacgagtcaggaccaaggtgccaggcatcctcctggccacaacaagggcaagaagcccatgaggatgcgcaaacgagacgtgcgtggagcagtatacccatgtcaggaggtggacccgacgacgtccacgttgaagcagacgcccatgttgttgcagtccgggaacatcgcgctgctgatgccgtcgaaggaggcgggcgcgaagaaagatgacgagtacgtgtacgtcggggacttgatctcgctgcgcgatgtggtgcgcatcactccgcagcgaggcaagtcgctgacgttgtttttcaaggaccggtcgctgccctgccggacgttcttgagccagtacacggacgagattgtcaaggacttgcgagtgatgatcagcgagaccagcggcaagagagggcgggaccagtcaagtggagcgggggtggcgggatcggcggcgcagttgctgccgttcttgagcgccgagcagacggagaaggccaaggagatgtcgaccaagttcattggcagacttgggaaggttgcaacctcttggtcccggttcttgcgtggcgatgaagacgaaccgatggaacagcagcaggccgatccattagccaaggcgtttgcagaaatagatgcacagaaggaggcattctaccgcacaccgtccaaagcgagggtacgattagtgtcaaagttgctgctgacgatggggttatctgacgttttgctgtactgttggcattgctgcagatgacggagatcactcgtcgctaccagcatattgcagaggaatatgcatatctgaacaaccacgagggtcacgtcgaacgcgcgatttccgagctgcaaactttcattgagcaccccaaggctcagcgtattctcatggaaacatgcgcctacgagcaatctaccaagggcattcgcgttggccccgcatagacttacaacccactcaagcaccggcaaaccgcctatgcaatcaatctctacacctcagagagatacacacaactccagcttcctgtcaccaggctttgcgtcacacaccacctacatgttccactcaaaaatgaattcaccgaaatacaacttacttgctcgttaattcgtttaataagcttactcgtcttggagagctgggatagtggacagatacttcaccatttgcttgatgaccttcttgtccaggcgcttcttgttggcatgcatctgctggagcttcttgtaggcagccacgatctgcttgtgcagcgctcgcatctgctctgcgtctcgagcgttgattttgctcgtaccaccgctagtgctgctcttctgctgcgcccgacactgctgactagcatcccagagatcttgttgtgctgctgtgaggtcacggcgcgccatgtttgctactccgcgagagtacagcgctgcaatcagcttcccactgcggatcgtaagtgcgtgagagaagcattgtacggcttggtcgtgatcacccaatgcagcataggccttccccatgttcatcgagcagtccacctcgaggtcgtcaaatgcggtcagtagtgtagtgttcatacgcaagcgaactcgggagatcggaacccactcgtcctctcggtcaccatcatcgtacagcacctccacttggctcgccgcaccattctcctcaacgtccgagaccatggcatccagccagtcgtcacctcggcgagagcatacctgaatgctggccccaatgctgcagcgcgctaatagatcgtcatctgaaagcgatcgcagtgcagtttcttgttgtagttgcgcagcacggagcacagcgatggcacgccgatagaatacgcgagcggtggggaagtttccgcggcggaagaacgtgttgccttgcgttttgtacttcgtagccgtctctcgagctttctccccggacttgtcgtctcgaagcgactcatcatccgaaggcaggcccactacactgccattctgccgctcgtactcgtcaatttcggggctaagtagagcgtattgcgcctcacagagctctttcaagtactcatcaccggtgagtttactgtctttcagccgcaccagcgtatgtgccttctccaaagcaccacgtaggtcagacaccgttggtaacaaggctcgacacggcgtgttgtcgatcaaaagctgcagcatgcgtactccgtcggcaaacacgagcgatacaccactgagcatcaacgccacgacgagttcacaggcagcccgacgcttttcatccaccgacagagcgctacctcctcctccagactccgaagcagcagcgaagcacaccaacgacgcaacttgtgtccccaccacaataaagttctgcagaagcgcaacatcctcggacctttccaacgcaatctgcagcaaactgcggagcatccctgccttgacaacctgtttggcttggtccttcgtagtcaccaacttctccaacgtcgctgccagttgctgtcgaagctgcaggcccccacctagcgtcacgtatatctgcttcacgagctccaggaacgccccctcctgctcttcacccgacagcttcacgtccagcaggttgatattaagtggagctctttgttcagtgctgctgctgagctgcaccagccactgagccatcgcagccagcacgttgctcgccatgaaccgatccaccaccatcgcgcccaaaaccgtctctacatctcgctccgacgctgggaattcaacttcatctgcgtgcaatagtgcctccagcaattgccacttggctgcgtggagctccgatgcgtcgtcgctgtcggcggcttgaacgtgtcctgacaggagagtgctcttcaactgttgcagcttctgcacgtcgtcagaagacagcgacccgcggcatagctctgccagcgccttgagagagccaatgcggacaatgtcgtcactctgaatagcgtccgtgatgctcgccacgagcgtggcgacggatggcgcggcggtgacagcctcgggcattgtcgctctgttttttttgtacaaaacgctctcaaactgtcggtccaatgctcttcaactgtcggtccaaaataaactatcggaatgctcttcaactgtcggtccaaaataaactgtcggaatgctctctaactgtcggtccaaaacttcgtgtcccacattaagtggtgtgttggaaagactgcagcttgctattgtcttgctgtgagcaaacaggcgcagtctttccgacacggtgtttaaacagacgacgaagttttcggccgacagttagagagagcgacccatttttgcgaaatgggtctgtcggtcccattttgtccgtttcctgttttcacccagaagaagcatggccgacgagcagctccaacgggaccaggcgcagctccgcgctgcgatcaaatgcgtctcgaacgaggcactcaaggtaaatactgacgccaccacatgacctctctgctgtgctagcgtcccctcaattcgagcagaactcattgagaactccttgtgccattgacacagacgcacatgctggcggcgttggatacgttcgacgcgtccagcagctccagccaagcgactgatgcagctaataccagcccaggcttcgtgcgcccgcctgaccgagtcgtccgaggtaacggtgttccgtcgcctgtcgtcattccgccggtacgcttttgaaatatgctgctgcatctagggtggcgctaaccttttgcgcggtattgcgtgtaggtgggcggaggagacgcatttccgccaggtcttggaggaggtaacccggatatgctggtcggacctgaccatcctctctttggtcgtcgcggtgacccatccgctggacctgtgcctggtgcgcgctttgatcccttcggacccccgatcgaccctctcggccccagcggcattcggccacctccgcgtggcccagcacctacgatgccatttggaggacctggacctgaccacatgcgcatgccgcgtgacgacgatatggaccctggtttcggctttgggggcgggcgaaacaatcgtggtggcggcgggttctcgcagccattcggctcgaacaacgccttcttttaagcggccagcagcattaacactaacgctaagtgaacagaggcaatgaaggaaaggttgtatgcaatcgtgagcactaagacgtggtactgtagtgagggccgctggccaggtggggtttacgctctgcgagccgctgcacaagcatcaactgacaaggttcgtgtactgccgacggctcttgcagtgcgcatttttgtactccagcttggtttttgccagaacgaagacgcctacaactttttggagtgaggagtgaaagagccaaagccatcctgatgatattttatgttgcttgtggcattataggctatagtgtgggatggtgatggctcgttatcgcaaacgcgatattgcagcggcaaacttagattacttcttgcccttcttgccgcccttctgcttctctgtaagtgacagagcagaccatatcgacaggaaattccaggctcaaaaacacaaaacacagtttgcactagcgtcaaagtgaaagaactgaacgtaccctccttggcgggctgctccttattgcctcccttggcgttgccggcgttcttctcggcggcgggcttctgctcctccttggcctgttgctgcttcttgtccttgcggcccattgttgacgatgaggtggtgcttggggacttggcttggtgtgcttgaggcgaaatgcagaatgaacaggccttagagtgctgcagcgatacccacaaggcaagaatacctaggacggttataaatggatctcagcaactacaactgctatagatcacagactcgcgtccgtgataagggcaagaggctgagcctctgaggcaactggtgccatgcacttgacatgtgatgctcactgcaacttcaacaagacacatacaaaacccaagtataacaaacggcgacgccgcttcaagcagaaaaccgtccaaagatgaagccagcttcgaagctcgagatcgaacattcctttgactacttctctcgtcctcgagctgcttcttggcggccgagatcttcttctgcagcgtctgcggcgtgacggaggcggcaccgctgatgtgctcgaggtccacgatgttctcctcgcggctcttctggatgcgcttgctctgcttgcgcggcgctgctccatgaagctcttgtcctcgccgcggttgtcgtccacgttctcggacgcgttcttggtggcctgctgcatgacgtagatctggtttacattgcaaagccgcaccttggtcttgcggtcgtacacgcccacggcgtagctggcgatttaaatttaaatttaaatttattgcggtttagtcggctaactgcacccgatactgcgcgctgctgcagcctcgcctacggatcgcatgttggaacaacacgcgcccgcggtagtcgcccatacatgacagcacggatcacacagtcgcagagactgcgtcaccagagctgtccaggtcatatgcattatatgcagtaaggtaaagagcttgacaccaaacacgctaggtcgtgccgtcggtaccaagttgttgatttcgttgctcatgccagcgttcgccacgctcacaaatcttgtctcttcgttcttggaggcggcaggatagttgactttgaacgtagcggcgaagtcgtgtacgaagttggaagaattccacccaatcgcagccgatctgatgcaatcagatacacttcacacaaggggacaatcaataccggtagccggcagccatggcggacgacggcggcatgacttcgtgcctgaacctcatgcggcgcatgcccccgcgcgaggtggagacggacgtgtacaacctgacgcggctactgcctgcgctggccgacgacctgtatcagcgcgtggaccagccgctgcaggtggcggtggacccgaccaacggccgcaagtatctgctctgcgactacaaccgcgacggggactcgtaccgctccccgtggagcaaccagtacgaccccccagcccccgagggggaaggcttctacccgtcggagacgctacgcgagctcgaggtgcaggccaacgagatcttcgactcgtaccgagagctctactaccaggggggcatctcctccgtctacatgtgggacctcgagccgggcttcgccgcctgcttcctcgtgcagaaggacgtgctggaccagcgcttcgtggagaagggctcctggaactccatccacgtgatcgaggtgcaggagggcagcgacgtgctggacaaaggagtcaagcgcgccacgtaccgcctcaccacgtccgtgctgctgtccatgaaggtgaaccgccccgagctgggcgacttgacattggacggcacgctcacgcggcaggcggagcgcaccctggcgtttgaggaccagttcgcgcacgtgtctaacatgggccgcatggtggaggacatggagatcgacatgcgctcgagtctcgacggactctacatctccaagacccgagaggtcgtcaacggtatgcggaagctgcagcaaggtcccgccatggtcaacccgtttgtgggagagctcacgggggcggtgctcaagcacgggctgaagaagcagcagaagtaaggcagaatggtttgcaataggtattaacacctgtgcgaaaaagttgaaatgcaagagatcgccatcatttcctttgcggggccttcattttattaacgcgtgcgctttactgaacgccgcggcttgtggattcttgtgtctgccaagtgttctcgaagctctacttcagtatcaaccaaattttgaaaacaatcaaataccgtgctggatacatcaatcatagccgtacggtgtgccaaaatgtaaaaccgtcaatggtgcagcacggccttgtgttggagaagtactaccagttgattaaagcttggcatgagctgcaagctactagaaaccttcaagctcggtgaattgacacactacgcgtccgatctaaggaatttcgacagtctccaggaattgaaaggcagaatgctgcgaggtatccggcaatttgtgtggatggcgtaattgatatggtgggcaactatcacaacaacctacatacgagtaagtactttagtaagcaagatgccatgtaattctgtgtgtacttgctcatttggcactattctgcgtatcatgacagcaccatctttcctgtcttcacgtccagcgaaggccaccacgatggttgatatggcacggcgtggaaggcaccgtcctgcgtcgaaaacttcatggcgggcacagtctcaccagcctccgactccgatggaagaaggtggccgaggcgcatcatggcgatagcgctgctcacgtccttcgcaacgttgaagatcgttccaaccgctttggactcgcctgtggcgacaatcttgtctccgattgccggcgccttgacgtccttccaccccttcgagtccgccaagtattctcgcagcgccccatgggagggtgcatcgaacggcttgaacgcaagctccgacagagtcttaaccacatcctggtgttccgccggaaccagcgcgacaggcactaaccgcttgcggatgttgcccttgaactgcgtgcgagccgtgagctcctggccaacatagcaccccttgcggaaggacacacccttcagtaagtcgaggttgcactcgagcggaatcccatccaccagctccttgctagcagcatacaatgatgtaacacgatcagtccgagcacgtctgacaacacgaagtagcaagaaaaatcttggtctcacccttccgcgactccgagcgcgatgcggtgatccaagtacgcagatgtctccatcgtctcgtatccctccggcaagctcactacatcaacaacaacaagagcaacaacagtcagcaattgcatagcgcatcgtaccttcctctaccggtaagtagctgtcccttacgcgtcgagtcaatcgggacaatcgctctaacgccaaagtgctctccacgcgggtcagcgtacaccaccgtctcctctccaccgttcaatgactgcatctcgtccagcaccttctccgccggcgacagcgcggcgccagcctcgctcacagcggcgggcaccgtggcgtagagcgcgtaggcgtccgtcttgtcctcgatcttgaccttcatgcgcagcttgtagcgcttccagtgcttggtcagcgcctcggccacgtcctcgtcgtagtccagcaggaacgcgtcgtccgccagctgcagcacgttgcagtcgcccaccactcggcccttggtgctcaggaagccgccgtacagcgcgtcgccgcggcgcgccacgtgcttcatgtcgttggtcagcaccgcctggatgaagcgcgccgcgtccgcgccctgcagctgcgtgagccggcgattggccagccgcgccacgcccgagcgccgcagcacagatgccatctacctgatctaagctgcttgcgttccaggccgcaccttgtcagatggctcatccagcacgattgcgtatgtatgttgagtgttctcggcaaagtccgattgcgccccgtttcattttgagccaatcgcgggtgtttgacaagtaacattccctccccgctggaaaatagcattcatcattggagggaatagcacttttccgccaaagtactattgcgcggaaacgcgtgcgcgtgtttctgcgacggatttgacccgaataaagtatgtgcgcatcaattcccccgatacaagcgctgttcgcgcttcggggaattgttgcgcgtagtatactacgcgcgcaacctcgcagttggaatcgcaacctcgcagttggaatcccacttctgggaagccctattttaggccctatccaagtcgaggagctccataggagacagagagcaatgggggagcgcggcttcgccatcaaggcggacgcgaccaagacggcgtgggagtcggaggagttcccgctgctgtgcgagagctgtctgggcgagaacccgtacgtgcgcatgatgaaggaggcgtacggctgcgcctgcaaggtctgcgcacggcccttcacggtcttccgctggaagccgggcaagcgcgcgcgctacaagaagaccgaggtgtgccagacctgcgcgcgcatgaagaacgtgtgccagacctgcgtgctggacctgcagtaccacctgcccgtgcaggtgcgcgacgccatcctggccaaggaggagggcgccggcgccgagctggccgtcaacgtgcccgagagcgacgccaaccgcgagtggttctcgcagcagcacagccgcatgctggagcaggagggcgccgtctccgcctacggcaagacgtctggctcggccaacagcgcgctgctgcgcatggctcgccgcgagccgtactacaagcgcaaccgcgcgcacctgtgttcgttctacgcgcgcggagagtgcaaccgcggcgacgagtgcccgtacctgcacgagatgccgcgcgacaaggacgacccgctggccaagcagaacatcaaggatcggttctacggcaagaacgaccccgtggccatgaagatgctcggcggacagaagaagaaccagccgcggcgggacggcaagggcgacggcgagccgcgcggaccgccacccacgcccgagggcgcgtccaagcccaagccgcccccgctgccgcccggaaagaagccgccgctccctcctggaccacccccgactgcggcgaagacggccgaggaggaggagaccaaacgctaggcacaactggagggggcgggttagttcacgttaggtcatacagatacgcaacaagcacaagaccatcaagactcgtaccatttcagtgtgcgaactgcatgtacttggctgcaactactactaataaaacaaaaaagcttcatagtactgtcactacattccattaagggctgaagcttgtggtggcttcagtttagtcttcgtgcagtttgacgccgtagagtttgagcgcttgcatgcacgctacgtcttgcgcagcggtgattgtgcgccccatcgcgcgggccacttggaacccgttcacgtacagtgccacagcatgcctaggcggctctgccttcttaacctttttggttttgttggtcgcggcatcctcctctgaatccttgggcactaatacgcctgcttcgttgactgtgccaggcactttgatgttcttgaattgacacgagatcgggcgattgctagagcgactccactgcgtcacgtaatggttcaacaccttgcgcgggttcatccactgccggcgtcgaatagcttccgtaagtcttgggaacaacaacttgtccaggatcgaccgaacctttcctagatcaccagggttctccatatacacggcacccagggtggcctcgaacacgtctgccagcacgtcttccacgtacaaagtgccgttcttcttcacttcgtttcccaaccggataaattcctcgtagccagcattacgcgcgacgatcgctagcttcttgtttttcactagtgaggaccgcacttgcgtgagaaggtgctcttggtggtacgggaaggcatccacgagaaactcggacgacaagagctgcaacacagagtcgccaaggaactcgatgcgttcatagcttgggtcgtggccaataaactcgtcgtcgtcgatctgtggcttctggaacgaggcatgagtcatcgtctgcagccacaaatgcgtgttggcgatatccacgccagaacgcgcagcaaaacggcgatgcagtaggcgtgtatgcgtgtacttgctccacttcttgatagcatcgcggtccttttccacgaacgccttcgcctcggtcagcagttcatccgttgaaaggaagcacagctcgcgcagttcggcgtcgtgcatgtcgatcagtttaccgagcaaggcacgacacggaacgataccctggtccttgtagagcgcgcccagaagagcctcaaaacagtcagccgtaattttccccttagtgtcttcattgagcttggctaagtcgaacgcactcagcaataagcacccaaagtttgccgttttagccattttgccgagactgatattgttcacaatatcgacacgggtctggtggaggaaaccttcatcggcattcgggagcttcaaaaaggctgatgatgccacgaggaaaccgagaacggcgtcgcccaaaaactccagccgttcatacgggcacaggtaccgcgagtggaattcttccttgaaatcacaagacaggtgctgctccgcaaccttcctcaactgggaggcgttattccctgccgccttacctgggatgagcgcgtcaccgtcaagcgccatacttcttgatcgcttgagcgaggcaacattctggaatacgtgcccaaggcgcacacgggatcgagtggcttcgacagtgttgacattctgcatgcctatgtcgatgtacgacccgtgagtaaatgcttggcgtagaagcgctttgtccctgaactttaagcccatttgttcctcaaagctcgtaagcaggttgaagtgtcgaacatacttgagcaccataggcatagcactcccaacctcgaagaggtcagcgcgaactcctgtaagatggcactccatcggatgcagctcttcagaatggggttcaacttccggtgacaactgaagaaactcgccctcctgctgccacttgcggatcctcttcttggacttggcgccgtcataattgcgagcaccttgaccacgatgcgcaatcgcccggacatgtcgaccatccttcatgacaacaccacttgagacaggtttacccccttcagcctctgatggctcaaagataatttcatcgacacgaaagacactcggctggccgttgatgcgagtggaaacgacgcagtcgatcagctcgttgtggttgaattgagcgaagaagtcgcgcacagtgaatttcgcgctgaaatcgaggaacgccagcagctgctgcactgacagcaaccggcctactgcgtatcctatacggttgggtgagtccaagtcttcacgtcggagcagaggctcctccttcacggcgataaaccgtggcaccaagtgataatcgccacaaatctccgacgggtctccagtagcgtgagcggggtcaggaaataccttactgaacaggtgagccggttggatgcccagcaattgctggaacaaatatcgctgcagcatgaacagcgaatgacagaaagagcggtggatctctccgttcacatcagcatccacatcgttgccagacatcccgcgcaccgacgacgggagctcttccgggataaaatggatcttgcacatcacgtcaccgcgggtgtactcgaactgaacgcagcatagcataacaccatcatcagtgcttacagtaacagcaacattttacgttcaacattcgccaggtcgctcacccttggcacctcaggcggatcgcagtggcacaataaataaaagccgtcgaagaggtagaccttgtcctcgagcatgatcgtcgtctggcgagggcagcgcgggttcacttgcacacagacatttccactgtgaatttctggttgccaacatgttcgggaaagctgaagttgcgcttactctcggcctcccattgcatgcggaagcacttggtggctttgcagtggtaggacacgcgcagacactcgtcccccgcggctgccgcggctgcaactggaagcgctggaatagcaacgggcactgcggcgggcggcatgggcggtgcttgtggcgggttggctggagctggggtcgccaccggcaccggcactggcaccggcttgggcggcgcctcctccgctgcagacgcgcccaggaacgaggcgttctcgtgctccatctcgctgagcgagagcccaacggacacttcgtccatcactggcgtcaaactgctgggaaatcacggaatgagagttttggccaatgagttgttgagaaaagggcaattatagcgaatagcaggtcgttatgcagtgtggtgacggaagatgaggaaggcaagaaggcaagtgtccatggtcgtctgcaaggcagacatctatatattcatcctcccttgtgcgtctctctgtctgatgtgtgcgatgctttggtgccgaacgcgcgcgctgtttacacaaagtacttgcccttcttgaagcagctcatgcacagacggtgacggagcttcttctcgccgcacatggggcagtcctggaagtgcacaatgttcttgaggcgcttgctcaggtcgttgttcctaatcttcttgcgggacggcgtcacctacaacagcgatacacaataagcgcacagtcagcattcttgctcaaccaccacttgccactacatctccagccacgcagcaacagtagcagcagctacgcgtctccaagtctggttctctccatgggtccaattcgcagtagcattgctctgttgctgcatggctgatggcgttgactgtgttcgcataccttggacttgggggcggccagccagatcgcttcgctcagcgggttggagggcagcgcagccgcgccgccgttaagcgccagagggcccagcgccggcatctgcgacgtcgggaacatcttgtgctgcaggaacgccacagcgcgctgcatcgcgtttcgcaccagcatcgccgccattgtcaccggtcgagcaggtcttgtgtcaatgctgccccagccttacgtgcggccatcggttgagtggtgtggtccacatgtggatgcctattctatgattggatgaaaataaggttagcgtaagcgaccaactttagacatgatgatcacctacgtagtagagccaaaatgaccgacgccgtgttacacgacgtacggcgccaggtgtgcgaggcgcaggaggaatggaggaagtcatgcgcccagaaggaggaggcgtccatgcccttcgtgacgctgacctatgctcagagtatcgatggatccctggccgcagaaagaggtgcgggcgacagattacaatgctcgagtgcagcatgtctgaaggttttgattcccaggcaaaccgacgctgctcagcggaccagcttcgatgaagatgacgcatacgctgcgtacggttcatcatggtattttggtcggcgtggggactgtgctcgcagacaacccatcgttgaactcaaggctggtggaaggcatgttcgctatgatcgagcctgcagcaaaaagaatccgttcctgatcaatgtaaattgatgctcactgcagggcccaacccgcaaccgatcatcattgacacgcgcttgcgctgtccgacggatatcaagctgttcacactgccgacgtgtgcgaagccgatcattatgtacggccgcgggtcgcaggatccaggtgagcgaaaattgtttgcacactgtaagacttcgaaactcacactacaacttttcattgactatgcaggagtacctcaacggaaagaagcccttgaggcgctgggagctcgagtcttcgagtgcgccactgtgcgcggtgatgacggtcgcgaccacatcgatttaagcgacgccttccgtgagttcactgctacgtgctatcaccgcggctcatggtccgatttaacgagcatgaatactgttgtgtaacacaggcgtggcgaagcaaaatggggtcaacagcatcatggtcgaaggcggctctgcaatcttgacgtcgtgtcttcaggcagccgcacagagtcacttcatcgacctcgttgtcgtcacggttgcccccacttttgtaagtcggaagtgccgcgcgagaaattatacagacgctaactaccatcgtttcaccacgtgctgcgctcgcagatcggcggtctccgcgcagtcagcagcttgctcgcgccaagctctccagcgccagcatctacctttcctcgcttgcagcagccccgctatcatgtcctcggagaagacctggtaatcctcgggcggctcaatccttaatcgaggacaatatcacgagccgcagagcagcaccgagcaaagcatgtcacacgctattcgagccgaaagtcccaactgggacgcggtgccacttcaacctaacacagaaccccgttgccgcagagctgcaccgaaaagcctggtaaatgcgctcgcgccttcgctgcggaaggcgtcgcctcgcatcagtcggcatcggtgaagtgctcacaaggagcacggtggtcaactcgctggtccgcccaatcagaagagtcgccggccttttccgccaatcggcgatgcgacggttttcatagtggctgacgacagcgagaccaaccctatttcggccgaggcaggagcacacatgtgcgaaaagcactcctgccagcgaagtctcctcttccgcccgaggcgcagcgtcgcccgccagtctgccaattgcagcgccgatggccactactaccactgctgcaccgaccgctccggatcccgagccgctgcctgccagctcgaccggcagcgagcggccgcgccgactctccgtcacgaacgcgaacgcgctggccaacttcggcgagctgcaggcgcacttccgcgaccaccgcttggtggtcttcctggactacgacggcacgctcacgcccatcgtgaacgacccggcgctggcgctgctgtcgcccgccatgaaggacacgctcgagaagctgcgccagaagttcatcacgggggtgatcacggggcgttcgctgcacaagatccagaaattcgtgagcatcccgcagctctactatgccggcagccacggcttcgacattgaaggtcccgacggcacctccatcaagaaccaagtggcagcgcagtttttgacggatctgcacgaagttcgggacgagctgagcgaccagagtaaaagcattgccggcgctgaagtggaggacaacattttctcggtgtccctgcattaccggtacgttgagtcggcagtggaggagttgggttgatcttttggactcatgctatgcgggtggaatattttgtaggaacgtggatcctagtctaagatcgcagatgtccaacctagcccacacggtgagagaccaacacccgcgcatccggtaagataccgacgagatcctttgcgttcgttgcgaattgacaaagtcgatgctaatattacctaccgtgctctgaaactgtcctgcgattcagaatgagcgaaggcaaaatggtctacgaattcaagcccaagatcgactggaacaagggcaaggcgctactgtggctgctgcaggcgcttgggttagacgagcacgatgacgtttacactatttatatcggcgatgacactacggacgaggacgcgttccagctcttccaggcgcactacaaccgcaagggtgttggcatcgtcgtgaccgaggagagcaagtccacggacgcctcattcacgctgcgtgacaccagtgaagtctgcgagtttctgaaccgcttgatcgcgtgtggagaccgcgagaggagcgcaccgagcagcccgcagcctaccggcccgcctcctgcccaagcgcagtagcaagtgttacaatttttgcgtatgcagctctcgggtttcaattcagcgggtctcattaatgtttagcacggccaaccgtgtgcccattctccattcatcttgccttactttgccggtgaccagtgtcgtagtggtgaatgtccagcgttgcgtatagcattgcctttaatgtcattgcgtttcagttcacttggcgagcagttccgatagaccagcgccttttcttgcgttttgtaagaccactagatgctgctagacttgtgttacgtttgacgggcgttgaacttccgtcggcatttctctcgcacttcagttagtgcggtggagcgagcaagccctcgaccttcgtgcagcgccacagccctagtatgcgccggttctcccgcgtcatccctcgtgccgtctcggcgtctattgcctcacagcctcacgctgtggcgccgatcctgcagcgcagctgggtgcaacagcaaggtgcgcttcaactcggctgcgatcttgaactttcgatgagtgttgacgcatattgcatcatcgttgttgcagcatcgcgctctgccaagtgcatgcagtggcgccagttctcgagcgtcacggactcccatgaccacgatgagcacgcgtccattgcgcaggaggtgcgttgctgacgttgtatgtcattcgtgtgaatacctggaggttgacgttgttgttggcgatgcacagcttctgggcgtggacgtgcaggaccgtgagttcatcacgctgcgttggcaggacggcaagcggagcaggtttcacctgctgcatctgcgcacgtggtgcccgtgtccggagtgtggccacccgacggggcagcgagttgtaaactgcgccgagattgaccaagacgaactggacattgaaaaagtttttggtaggcagtgcggagttgaagcgttagtgagagtggatgaatgctaattgtgtgcttctgtgtgtagtgaagggtgatacgctcaacatcgtgtggaacgaccgccacgagtcgagcttctcgtgcaagtggctgcttgaaaatagctattcggactgggcgctggaccagcatgctcacgatatggctacgacgccgctggcgcttgatgctcctgttcctacaacggagtatgctcgtatgatggacaccaacaacgacgagggcctgtacgaggcgcttcgtcaggtcattgaccatggattcactgtcattcgcaacacaccgacggtgcctggcgcagtcaagatgcttgcagagcgcattgctccaatttcgcactcgtacgtttattggcaattggccagtgttcgaatatgtgcatttactaatgttgggtgtgttgtttttctctctttttgcagattccagtatggcgatgtcttcgacgtcgtggcagaacccaaacctgtacgtagtagtcggttgccaaatagctcctgtgtcatctaactgaaagctccgtgctcctccactgtaggtgaatattgcgtacaccacggtttacttgaagagtcatgttgacctggcgtactacgagtctcccccgggattccagttcttgcacgcgctccgcttcgacgagtctgtgaagggcggcgagtcgactttcgtggatgtctttgctgttactgaggagttccgtcgactccatccggagcacttcgctacgttctgccgcgtgcccgctacgttcaagaagcaccacctcactcgtgaaaaggcgacgatcatggagtaccagcgcccgcacatccagctcaaccatcgcgacgaggtggtagcagtgcactggagtcctccgttcgagggtccgctgagggttccgttcgacgacgtgatgccgtactacgacgcctaccgcgtcttccacgagctcgtggaaggcggcaagcaccgctacgagttcagactgaaccagggcgacaccgtgatcttcaaccagcgccgagtcctacacggtaggaagcagttcatgccgtgctcggacggtgtgcgccaccttcagggcacgtacatcaacatcgatgatgcgctctgccgctacaacgtcctgcgcacgcgcttcggcgccgacgaccccaccgccaagaaccagcgtgtcgccaacggcaacttctcgtaacgtgacaatcgtgttatgtaaaccttcggtacatgtagcagctcggatgctacagtagcagtgctgacatcaaagttcacaccagcctaacaaagtaatccatttagcggtcaagttgaagtggaccatacaaaactcaatacaaagcaatccgttgaaattttgtgtaagcattgtgtagcctgaagtgcacaaatcgctcgcaacatgacgctgcgcctgctgtgcttgtgcgcaggcctgggggcgtatctgtgctcgagcggcttgttgcgtctcaacgaggtcttcttccagtcttccgcgccttcaaccgccgactgggatgaccagaacctccagcacgacagcgtccagcaggccgacgccgcctacgaccgcctcgtcgtcgtgttgatcgacgcgctgcgagccgacatggtgctgggtagcgccgcaatgcacggcagtacagagggagacggacagcagacgaaaggggagctgaacgcccacatgccgttcaccagcagcctggtggcatcgggtcaagcgctcggatacgtcgcacatgccagcgttccgaccgtcacgatgcctcggctcaaggcgctggtgaccggcaaagcgccggcgtttattgacattttgaagaactttaactcggcagcattggacgaggacgccaaccttgtgtctttattggcagccagtgggaagaggattgtgttttacggtgacgacacgtggctcaaactgttcccggagacgttcaagcgctcggacggtacgtcgggcttttatacgagggataccgtggaggtggacaacaatgtgacaaggcatttgaaggaggagttggacccaacgatgcagaacgagaagagtggagattgggacgccttggtgctgcattatctggggttggatcacgttggtcacctacgtggaccgaggtcgccattgatgcgggagaagttggaggagatggatggtgtcgtgcagttggtggtggattcagtccgcgcacaagatgctcgaagaatggagaacgacagctcagcgcgaccgtcgttgatcttgctatgcagtgaccatggcatgtctgaagtgggcaaccacggcggtgcgacgctggaggagtcttctgcgctgttgatgtttatgcgtggtgacggtgagcctatgcgctcgtcggaggatatatcgtacaagcagaagcggagtcaggtggatttggtgcctacgatttcttcgctctttgggctacccattccgctgtatagcagcgggctgcttcttgaggatgtcgtccgtgctacctcgaactttgcgcttcacccaaaatcgtactatttgcgtgcgctataccagaacttccagcagctatatacattggccaagatcaaattccatgtttcagcgcttacaaggttcaacgagcagtacgaagcaccgctgagcaggctgtctacacttctggaaggtaaaaatggcttagcagtcgataagcagactgctgatgctgtacttgaagcctgtgcgacgctgcaagcaaaagtcgctcagagcgatggatccgagtacgattcgagcgcgattttttctggccttgtacttctgttcttcggtggcattgctacgttggtgatgcttattgcagcagtcaaagcggaagccaagtatggaatgggtcagagaacaagtttcctccttagtgtcctgggtgtgggcagtatcctgcagattgccagcttgtcgtcaagctcgtccatcgaaaatgagcacgcaaccgccttctttatgacgacttccttacttgttgctatcgggatcgtcttgctccgttggcgaaagtcgtcgaatagtgcagcaccgtcaagttctgggctcgtatgggtgggggtcttactggtgatcacacgaatgctgcgcgcacgcaaccaaatcatcaatttctggcgactaaatgggcttcacgtcgacacgaacttgcttggaaacgagttggctactgacgactcggtatcgattttatcgactgccgccacggttccttcaagtatccttccattgagtgcctgtgtggttgcgatttgtgcggttgtgttgcggaaggctgtacatcaaacggtaacagctcagcgcaagggagagcaagtggcgtttggtttaggcatttgcagcgggttcctgtttcttgttggcatgatggcgagccttcgggtcaaagagctttcagaccagaacagtgttgaaggctcaggagcactggaggggtggatatcgctggatgctgatgctagcgcgcgcgtggtgtatgcgagtgttcttctactcgcggtcttgacggtcgtggttggacgaagacttcgcttattgctgacggaaatgatcatttggctcctagttggcttgctccagcgcgagaccaattttccgactcttagcctcctctgtctgcagatcgaatcggtcgcgaggctcttagagtgcgaacaagctgcttcacttcgtcacaacggtgtcattgtggcagggctagctttgtgggtatcacaagcagcattcttcgcgcttggcaactcgcatttggtgacgacaatcgacatcagccaatcgtaccatggattgtcagcgtattcgcagggtctggttggcgcgttgacgttcgtcagcgttttctccggacagcttgtgtgctttgtgaatcttttccagtggttggacgtcccaacatccgtcgaagcattagcggcgctgtccggagaaaaagctcaaagcgcgagcgactcgtcaagcgcgaagaaagctgcctgcgttacgatcttcacgtatcagacacttcggttcgctgtctacacgtaagtatttcactcagggagcattgctttgaggtattgctgatactcacggctttttattcatctacagcgtcgtggtgtacttcatgcgcttccacttgttcatttggagcgtcttcgcccccaaggtaaaaagggatcctgaacatccacacacacacacgcttcttacgagtatggtctggtctaacttgcgtcttgtggtgaatttcagatgctttacgaggtggcgcatcttgctgtctctcttgctcttgttgcagtgctggccccagcaaccaggcaaaggcgacgtggccgaactttagatctatagacctcataaacttcgtagaattcatgtcaatatcatcgtcacttgttggctactttcggcgggtgcttggtgtcccatgcgtctaccccacatcccgcggactgttctcaagtccctccggaccaacgaaaccgcatcacatggcttcacgcttgttgggaatgacacaccacgagtacaatgcaaaaacgccaagggtacgtagtaagaaaaaagagagaaatattcaactactttagcacctcgtttgcaaccagcagcttcttcccattggggacgccagtgcaagaccccgcagcatctctagtggcgccctctttctccaaaaaatatagaaaataggctaacgcgacttgatgctgaagactacgaggctccaacgcgtcttccccgccggctacaccgccttgcggaacaaggctggagccataaggcggagcgaacctgtgtgtgtgctacacttaagcggccaggtcctccttcttggcaatgatctgctcagtgccgcaggccttcagcacggtgagcaccagctgcttgccgtcgtcgaagtcggcgcggatctcgtcagcgaacgtctccgggaaggtgggcagcttgatgtcctcgcgggtctcgcccgagtcgtccatgagcgagcagaagtcgtcgtccgtgatgtcgagcagcgtgtactcagcgcgcgacacgaagggcaccgacgtggtgtgcgtggagggcacaatgtcctcgtacttcttgttggtgaagatgtccagggccgtgaagttgcacttggcgtggccgtgcttgccggtcttggaggtcgacacgctcaccaccttgcacgggtggcccttgatcatgatgaagccgcccttgcggatctggccagcctcagacgggtaggtctccgaggcaccggcgtcggtcgagtggaactcgaagtcgtgctcctcgtggtcagccattgtagataagtgtagtgggtggggaaagaaacctgaagtgggtcaagacatggcagttagtggagctgtttctgtggggggcggaggtagagcaggcgcagccactgctgttgctgccgttagcgttgctgtgctgcggccggtgcctgcaccaccaggatctgtagctatagctgtcagcgtagctggagagcactcgtaccttgggaaggggaaaacttaactggggatccagaacggagcgcgatgctggccaattatccgaagccaccaccggttgtagagcagccacacaatgtgttgtgtggtccacaaaaaacggcctttttaagcgcgcttagcgcgctaagcgcgcttaatggactattttttggggtcaaatgcgggttccgacctcgacctcgacgtcggatcccaggtggcggcgactctatcggcgatgaacatcaggagacgaacagcctgctcatcaggggggcttcgtggagcagctgtggacgatgcggctaagcagcaacagctcgtgctttggcgcgatagacaagttgacatgagtaaggttgaagtatcaaagagtgtgcagtcggtggcgtgaccgacgtttggtgacgccagtcactgcgtcagcggatcagatactttcctccccttcaagcgagaagaagaagaacaccgacatcatcacctctagcttctctcgaccatggcagagccccacatgaagacggcgggcgtggcccagtacatccaccaccagagcgacgtgtcggccaacgccatcgcgcccacggacgccgtggtggccgagttcaagcagctcaagatgcggcgcaagtaccgctacgtgctgttccgcatcgaggccgacaaggtggtcgtcgacgccacggcgccgccctcggcctcgttcgcggacttcaacgccgcgcttcccgactcggactgccgctacgccgtgtacgaccacgagttcctgacgcccgacgggcgcaagtccagcaagctcttcttcgtcacgtggatcccgcagaactcgcacccgggcttcaagatggcctacacgcatgccaagagcgccgtccagagcgtgtgcgacggctgcttcgaggtcagcgccgtcatcaagaaggaagtcgctcagggcatggacatcacggacggagacgcgtccgactcggacagcgagttcgaggacgactagaactggtagagatcaccttagctgagtgtggtctgggcaggttgattgcattcctaaaattctattcggacctgtcctctcatcaatcaaaagctgcgttttggattaccgggttttacttggacgacgtggccttcaggtgctgccgctgcttgttgcgcatggccagcatctgcttcttgagtgcccgctccgcctcgaggttcatgcgcttgcgctccttctctctgtgctcctgcgcttcgtgctcggcgcgcttgcgtttctcgttgcgcgccttctccactgcgcgagtgtgcttgatatacacgaagcgcgtgtactcgtgcgtgagcatacgcagcaccgcaacgccggggccgctgcggtgcacgagcatatcgtacgcggtttctaacttgctcaaggcgtacgagtcgtacggccgaaccaggcgcatggcttcgtcgaactgggcttgtattgccggcgtcacgagcgaggtgtccttcgtcctaggggatcgggtcctcggcgaaggggtagtggcaggtactggaggttgttccgcttctggttcagtcttggatacgccgttgaccgcgttagatcctgctaccgctgcgtctggtgccgattttatctctgcattgtcttttggaccagcagtaccgttcacgctcaaggatgctgcggtggaggcatctgccgctgtagacacaccttcgtcgggcttaccagtgggcttctctaagggtttcgaagtcgtagcagtggtcgaggctggggtgccagtgaggcgaatgatttgggccacgcaggctagccaccttgtagtgcgctggacgttgatccgatccatcttcggtggacccaacgcttgctgagccgctacatattgccctgtcaagctgccattggatttccagtcagttggcttcggtggcttacgaactgacgcgttcgaagctgtgccgtgggcgtagccgttgtaccctttggcacttagagggttgatgtagcaaccgttctggacaaacttgctctccttcttctcaaagtccaatcgcttggcctccttacgggatgcgatgaggccacgtgcatcaactggggcacgacagacgccgcaaataatgtcatccgtcatacttgggaggcccttgggaagtgtaatgtcctttcgcactccatcctgaacaattgagatcgatttccgcttcttcttggcgccagctgtagtgccagccacgggcagataccgttcgcgttcacgagcacttgagcgacgcttcgtacatctccagtgctggacgtgaggaacggcagactcgtcgcccccagagcagtagaaaaggtgttgccgctcgtggaatgggtctaagcacacgtcacaagtatgctgctggctgaacggaccaggatacttggccaagtacctcggcgggttgaatgccctttcaagacgacggaacaacttcttgtcgttaaccaagtcctgagcaggcgtcggcggcagtgcgtacaccttttcgagctgcggcacgtaactcaggatcagctgaagaacctgaaggtgcttgtagttgtaatcaggcggctcggtcttgcaagtgcgcagtcccttgttgcaataccccaccgccagcgccgcaatatcccggatcacctcagcagcagtggtgtaatccggcaagtgcttcgcaaccgtaccaaaccgacgcatgtcatcacggccaacgagtagacgaatagggcgcgtgattagcttggctaggaggtcgccaatgtcctcggtgcagtcgcgatggcgctcgcaatacgcgtggaactgcaggatatgaccggcccgaagctccacgtgcccgttccctttatgcgcacacatggcgtggaaaaactgcgcacagtttactcggcgacactgtatccggacaccacgaccagagtgacagaagcagcactcacccggcgttagcggatccctcatcatcacttcgttcacgtcaggcaccacttcttcgacttcctccgcaggtttctccgtcttctcagcttcaccgctagtctcctctgtagcagcagcctccgccgcctcctttgctgctgcctccctcgcagccgcttccttcttcgtcaacttctcaacaggcttgatcttgctctccctcacaacgtgcgcagccagtcgccgcggatcccaattgatgcacagcacgtgaccgaactgcaccgcatcacccgtcgttgcttccttctcctcttcctccccaaacttggcgcaccggccccaaaaagcagcatctcctgctgtctccacgagcttcaacgctccctcgccacctcctttgccgcaatacacgcacgtagcagctcgccgttcgactccacggcggcagcagtcacacttccagtccgcatccttcatttcctcgtcgtcctgctgcgtctcacccttcgccaccgtctcgggcactggcaacgcgtccgcgtagcacttctcatgcactgcaagcttgcagcccacgcagacgcggagcgtatcgccccgcgtggagctctcaataaggccgcactcggaacacctcaaattcttctctgaactcccttcttcctccattttgacgtcccccgaagccccaggagcctccacgggcgcggagttttgcgcgccaaccgacgcgtcgccgtcgtccctggatttctcgccttctgcgggctccatggtcacgtcagcgggtgtggctgatgtgccgtcggtctgcgcatcttgtttggcgcttgcgtgcaccggaggctccgctgaggcggcgctggccgcggcagtcggcgtctccgggtgcgtcggcatcgtggacggtcgtcccaggctaatgtgactccccatttagaaatagtctcgagaggggtaaggggagtacaatttttgcgccggactatatttggaccaagttgaagtgggttgattggaggatgttactatgtagctcagctaaagtcccggtcggggaagagcttgggagccacgagcgtccaggagaagaggagtatcgtgacccactgcgccacgatcttcacccacatggagatgttattgaaggagctggaggcagaaaaagagtgagtaaatggacaccaaactgtgagtaaagagcaagtgccagcctacccgtccgccgagttccagtccgtcagcaccatggccatgtacaggccggcgaggcacatcatactgtagaattgccacggttcgtgtatgagctctcgaccgggctgaggaggctccaccgttgtgccagcgggagcgagggcggggctttcgtccgtgtgctgggctggatgcacatcaacgaccacgacgctagcgaactgctggtcgtggtggcgatcagcgctagcaggtcgtgacactgtagtgtctcggccctgaggcgttcgcccctgtcgaactagaagtttggcggccgcacttgacgtgcgccaacttgtccacgtcatcgcgaacgcggctatcacggcgttggcgatcatgctgtccgtgttggacgactcctcgtctcttggtgcaggaggcggatgtcttcgatgctcacacgactttaccgggttgctgactagcgcttgccagcacatgagcaccagatacgccgatatagcgcatggtggcagcaaacccacctcgatccacggggagactgcgtatccagaccaaacgttagatgaattggcgttgccgaacattttggaagccgcgcgcgtcttaccgcaagcgatgatcaaaaggccagctgctatgatcgttatggtcgtgaacgctaggcccaggtcgcaatcggcaaagcgcatgtactggtagtcgttgtgaacacaattcgtaagtgaggaggggcatatgcgcacgcgtaaaggacaaactgatgctcgtaccaagtaggtgatcccagaccctatgcaaaccatcgaaactgcgcacacgcctaagaaggccgtcttcctgcaaccgcagagatgttagaaagaacacatacttaagtatactatagtgctgatatccatgacgcaccacatgcaaacgctgccggcgcagaacccgcttctcgcctcaccctgagcctcggccttttccgcgcgttctagtcgttccagcaacgtatctcgaacctggtctagtaatttgcattgcgcaaaattctccgacaattgtgaaatttatgaagatctgattacttaagtaaagcggatggagctcacgtacacgaaacgctgacgatggagaagatctggaagaggataaagaacccagaggcgactcttgtaaaaggcacatacccgtcgaaaaaggctaatgatgttcacaataatgttgacatcacagtgagcagacgcgaattcaggatttcctggcatcggtgatgcaagctatcactcacagtttgggatgtagaacgacccaaccagcagtgcgatcagcaccggtacctcgacccacatgaggatcttgatagctcgcgcacgtggctgcacccagcccaaccgactgagcagtgcgcgcatcaagaagaacatcgagatgctgaagcttgcgcggaagatcatttggttgccctggcaggacgcgctgtcggtctcgtcacagtcggagaacgtgccgaacgaagacagcaagtctgatcaggcggaacaaatgcgtcttagcgatcgagatactcgaagcaaccttgcaacgccccccactcacctcttccgatcgtcttgaacaaggtggcgaagatggcattgcagaagaacagcgcgatgtagagcccgcgcagccagttgacctcgatctgcaggaaagcgggcagcatggaggccatcccgtcctccgctcagtgaacgcactgcacctcagtttcccttcggagccgcccaaaatgtctcctgttgacaagcatcgcgtcaaaattagcgacctttcggtatcaagtcttggaggtcttcccaaacatgataaatagtttttgtggttccagcggccacgcgccacacaaccgcacaagtcgcacaaggaagggaacacttctcccacactctggccccgactcgccggcctggaagcagaggccgaccaaggtagagcgcagcagagagctccgcacgaatacgttcagacgcgcagtatgactaacaccccgccgctgcctttgtagaccccatggcgactaagcgaggccgctctccgtctctagcggaggacgcacccccttccaagcgcgggaacaacgaggcccatgacctgcagcagctcaacgaggcggcctccgctctacccaactctctcccaatagctgcggagactaccgtcgcaattgcagacgcagtagcatcagctgtgggccaagggggcgctctaccggagactaccgatgcaatgggggccgaagttttgatggtagagcagcacactactgctgccaacttgtcggctgcaacgccgacgcttatggtggtggctccagagttccaggtggtgcacgactcgtgggaagccttcgaagaagcgctcaagacctacgccaaggcgacgtaccagctctacgtgatccgttctaccacgtccgtcaagcgccgaaatttgaagattgccaagggtgcaacgaaaggagacgcggcgggtaatgctggcgcgttgaggaaggccgggctggagctgggggtcccgatggagcacgacgttgatggtggagagcagctggtagaacgcacgttgatcccggagcggaatcaatggtattccaagtccctcaagtgcacgcacggatggaaggaccgtcatcgcggcactggcaagcgtgggtccggggtggtgcgctctacgagctgtcctgccaaaatgtgcgtgacactgcagcaccgaggagcggggcccgatgactggaaggtggtggtgaccaaacatgtacggacgcacaaccaccagttgtccaaggaattgttcctctactactcggagaatcggcgtatttacgacccagagttgctgactgttgccggagatgcaccgggcgctacgaacggagcggcgaagccctcggtagatttatccactgcgcagctcacgtctttgctcgaccaggccaaccagcggactggggtgttccgtatgctcacgtccagtgaggagcagagccagcagcaaacgtcgtcgatggcattcatggtgtcggacgcgttgggctccacgcctgctgcgcccaatgggaatatgcctgaccatcgctcgaataagcagctcacggaagctagcagcaaccagtttgtgatccgaccacgcgtcaagaatgctacgcctctagcttccatgcctccgctcggggctgtagttttgaccccagggacaatcccctcaagagcgctggatggtggtggcttctgtgtgccacgaatcgcagtcaaggtgcacccaacatgggatgccttccacgactacgtagcgcagtacgcgttcgatacggcgcaagtgtttcgcactcgatcgactgtgtcggttgcctcgagaaacgcgaagatattggcatccgccgcagcgaaagcagaatcagatggccaccatgttgcgagctatgcaagctttgctgcgaatacagcatcgccatcttcacgcttgattcccgacgagtacaagtggttctcaaagttgctgatctgcacgtatggctggaaacgtagagcacggggcaaagtgcctcgtgccggagaagatgggggaagcggtccgtgtccagctatgatactagctcgggtggaacgcaacgttgacggccagtggcacatcgtgatcaaccgccaggtgcccgaacacaaccaccggttgaatacgcaggtcgaagagccctgcaaccaagatcttttcgaacctaatgctcatactgagtcgactttagctactgcatcattggaaccaacttcaagtgagcccagcccaagcggagacagctcatcactactcgaggccgaagcaatggcaccggaaacaagcgtcgaagaagcgcccacggcgccaccggctcagcgtgagattgttgtgcgcgttcccaagctccagtcggtgttcaactcgtgggacgatttccacgcaagtctgaaggcgtattcggacgccacgtaccagctttaccgtacgagaaccaccagctcggcgaagggcaggaacaagaagatcacgcagatgaggcgcggggacgtggatggcgagaacgctgagaacagtgacaacggaagcgaccctgacacagcattgagcggggttactgcaacgcgaaagattcctgagtcgtggagatggtactcgaagaccctcacctgcacgcacggctggaaggagcgacaccgaggcacgggtaaacgtaccgcacacgttgtgcgctcgacagcgtgcccagttaagatttgtgcgaccgtgcaatacatgaacccgtccggtagagcagctactactacccccgtcgaaggcggcgatgatagctgctggcgcgtggttgtgaccaaacatgtcgtggatcacaaccacaatttgtcgcgggagctctaccagcactattgcgagaaccgtcggatctacgacccggagttgctcgcaattgacacgtcgagcgaagccgccgtggttaaacggaaggcatacgtgacccccgaccaaagcgcagtgattgatagtgtgtcaatgcaaggggctcaaccagatacaagtcaaatggcttctcagcagaccattcttccggcgcaaatggaggtaggtctagcggaggctgtggcccatgcccagttgttctcgtctcctggtgacaaccatcccgttggaattggtgtgagtggggcaacagctttacaacgaaatgtggctgcagtttcggcggcctcgactagtgtccctcagcaaattgtgccgtcagtcgtgctgcttccgtacaacacgacgccctcctacctacctcctcaggcacagcagcccccagctgaacaacaagcccagcaacagcagcaacaactccaaccacctcaccagcagcaacagcaagtgcaacaacagccagcaccagttcaagcagctttcacgggcacccccaatgggtctcacctcggacgagggtcaggagagtgcgagggcgtggccaccctggcagctgtggcgtcgccaggcttaactgcagccaacgttgtgctattcaaccatgccggaatggtatcaggcggattcccttcgtcagggacgaacgtgatttctgttgcctgtcgagtacacggatcctcgagctcaacggataatgggccgatcacgacccaatcgggcagccaggcagtgggctctgctaacggtcaagcaccgcagtgcacgtgcttccggatagcaggcggcggcaactacgtgaccatcgtccccgccaccgatcctctccccgctcctgaccacagctttgacgctgatgataccatattctacgctgaagacatggagggagcctggcagccatcgtccaatgttgagatcgagaaggtgactaccgagagtggagagacggtgtggcgagtgccgcgtatcgtgcgtcgataccccacgtgggaggcctttcacaagtacctggacgcgtactcgactgcaacgttccagctctaccgagttcgtacgacgtactcggtgcgttcacgcaacgtccgtcttcgtcagcttgctgcgagtcgaggccttgcggtgcgtgaaggtgacgatggagaccccaacgccgcagtggagacggagcaggaaggcgttcatggattgtcgcgagcccacgtcgtcccggaagagcacgaatggtactccaagacgttcttgtgtacgcacggctggaagcgccgcagtcgtggcagcggtcagcgagtgagtcacaacgtccgggccaccgagtgtcctgccaaggtgtgcgccacgcttcagcgcacggatggcgccaacacttggagtgtcgtggtcacgaagcatttggtagagcacaaccacgagctctcggaagcgctctaccagcagtacagcgaggttcgacgcgtacgtgaccctgaagtccttgcacaagcggagcagctgtggcgcggcggagctactcgtcgccgcgtgttcgagttcctcaaggagcggtctccgaaccacgtcattctcatgaaggacgtgcacaaccttgtgcagcgttggcaagcgcaagaaaggcgaccccgacagtcaccgcagggagaggacggcgaagaccaaggccaagagcaacaacagcagccgagcgagacctccccgcctgtcgtttcagctagtcacgacgatgagagcacttcttggttgtaatctaaccccaacatcgtttgcatgacaagccgcctggatcgatggaaactgcttttggtgaacggacacttccagttttgttgtgcttttgctttgtgcttaggttgcatggcgtatttccaaggcggggacttcgtggagctcttgagcgcgcagggcaaggcgcctgccgccgcgtggaagctgcagggtaagatctccaaaacgtttgacaaggggatcagaggcaatgcgttccagctcgacggcagctcggagaccaagatgcagctgcctaaagccgcttcgtcctcgcttggtctggctcaaagatttgtgattattcagctcttggtgccatttacccgctcgttctctgtggagatctgcttctcggacttccagaaggtgcgtcgccgattcgtcgtggcctcagcgtttcgggagacagcacgcacagctctgcatgtccagctccccctcaacgctgccgatgtgcctcgggaccagtggatgaacctcgtgttcgatctgcaaactctgtcggaggttcacttcccggactcaggctaccgctcgatggaatcgctctgcattggtgggagctgtcgcctcaagcggatattcaccatgaaggacgcccctacgccgtcacgaggctcacaggttgtcagacacgcagatattcgggatattccgagacagttcgtgttctcggcaacgcagcgtggagctagtggtgcactaccgattccgacgctgtatttcgctatggagcctgcttcagggatcggaggcgtccatggagttgctgtcactgttaacaacaacagcagcgctccgaaatcttctcgtcgcagccaaacagcgccggggaaagctccgaccaaacaacgcaccaaaggagcgcaagtagtgcgaccagggagtgaattggtgcagcgaagagctttggtacagcaacaagtggagcttcagaccgattcggacgccagcaaagcgagtggcctgggccaccaacgtttgcgtacgccagccagagtgagcactacaggaagtaaacttcgccagccgcaatcgagagtcgggaaggtggtgatggtgacgaaggaggactattcaccacgaatcgaatccccatcctcagaactccggtcctctcgtggacgtgcttttgagacgccacaagactcagaactaccgcagccaaagagtgcgtcttctgatcaagagaacagaccccacgacgccaagaaggaagaaatggtacttgcagcaacaccagtacaagtcccagatcgggctctaagccctccaaacagcgtgaactccagcatgatggcgtctccaaacgcgaaggacttgcggagtggcgagcgaagtcaaactcttcgtcaatccatcttgggggagattcaacaaaagctcgcgagtttggaggatgaggacgagaaagcggatgagcgagacagggagctgtttctgcggcacacatcactgcacagtggggaatggtacctgcagcagctccgtgacgaagatctaaacgacgatgacgggcctctacttttagacgatgaagacgatcgtactcaactgagctcgtcctggagacgagaattgaatgacacgaacgcaaacctcgcgatcccctcttcagatgacacgctacgtcgtagtcgcgatgatacaacggataaggactccattttctctttctcgtctatggtaaagtcgagaacgaaatcgactggtaaaagttcgtctaagttgttcgacttcgactctctgctacaagacgtgaaaccattggcgccatcacttgacgacgacaaagctccacgtcttgatgatctgcacgcgcagcttgaaaagagtatcaatcacgccattagtgacgcagaagatgatgccgacgagcaggaacttgtgaagctgctggcggcaaaacgatctgcgagagagctattgccgcggtctgcaggcaatagtcaaggtaacgaggccgaagtagtgaacgagcataagcgaggttcaaatgaggaagaatttgccagcgaaccagttgacgaggccaggaaagacttgacgccagccgaacaggaccagggacaagcgaatgaagacaaggaatggcgtttgaatcgacaaggtggtgactctaagtttgatgctggacatggagacaccggactatcgattgatctgtaagttgcaaggtgttttatctatttttttgtgaattgcctatttaagtttctctattgaaatgggctacttcatctatctacgcccatggttgtagaaccagcgagcttagtgctagcggtggggggagtgtccacgatcccgacgaagatggcgactgcgagagctcaatcggtcatgcaagtccaacgagtcctcagcttattgagtccaaacctgagaatgacgacgacagcagtaaatcgttgcatgatgaggacgacggcgatgactcgagcttcgacttcggtgagtttcctgatacctgtcggtgggaaatgctgcgaggcagctaactcggtggttaacttgcagaggatctggtggaagatgctgcatcgagcgatagccgttttgaagatgacagagcaactggtcgcgatagcatctcagcctcgacagacagaaagtcttcgaggccaacgcaagctgcaacccccacgcgacactcgaataacttcgtttcattgctttctggcagtcctcgaagaaaccagcacccccacgaaaatcaacgtgccagccttgaccaaccagcaaaaatggtacctgcaaagtctccgttgatagagccttctcgacggacacgagacaaactccaggaaagaaaatcccaagagcggtctctgaagctatcccattccagtgagctgtcgtcctccttctctgctcgtcgactgcaacggctgttggagtctaccgactggacagcggaacttgatgctcaagcgagtctttcaccctttggtcgagaaagcgaccgaaagtacagccccgccaactaccgctcacccgcgtcaagtggtaacgtccaacaacgatccgcttctaaaggcagcacgcgccgatcgtcccaaaaatcatcgtcaggtcttcaaactccagccactgcgtccattgagctggtatacgatccactcctgcgttgctactatgaccccgtcgccaacaagtactacgcgctagcagaataacttctaacacggactcggccaaaacttggtttggttctcttgatcatcccagataatttagtggaacatgcactgggatgacaccattccgaagagaaaaccttaatctaatcatccgtcatccgtcccaagcagcatgttggcgacgctgcgacgtgaacgcggactaatctgctcctctggaatggtactctgggtgacagtgtcgcgctggcgccgcataccgagatcgcggatcacgtctttaatcatgtgaggcttgaagtcatctgacagcgatgcccagaattcacggttcgccagcaacgtgcggtaggccacggagtttatgttgaccaggatttgcgcccagacgctgaagagcggcgacacgatgaaatcagcgaagccaacctgcatcttcttgagcacgattgtatctcggtccatgaagggcgacacaggaagaccaagctgcttctccatttctccttggacaaagaactcctccactacacggtcggtccaccggagcatcgtttcgcgctccttggctgggttagatacgtcacaggtgtgcaggatcatcttgagcagcagcttcttgtcgcctacattcttcaccagcaccgcgtcttcatctagcgcagccgacagaatattggtcttgaatagtgcgacatcctcgaagtgcttggccatatccgttgccagaaccatctgaatgatcatgtcacgcgcgtacttgaagtcgtcgggtgctaagtggcccagtacgttaaggtcggagttcttcatcaccaagaaggactgcgccacgtggtagttttccagcacggcatggtcgttgtagcgcagcgcgatttctgacgctgttgaaatatggaaaccgttgttaaacccgtcgtgcatgaagtcgtgtacgcctgctgcgatcagagccagcgcgcgatctagcggacgcagatacggcccgagctctggctggatgaggaaatagtgcacggtctgcatgacatcagcggcgtgaatggcgttgtggtacggattcgtagcgatgtacccgcgctggatctccagcaggaaattcacaagcaggttgccttcaatattcagtgcttggcaaggcccgtcacgcaggaggtggtggccaatgtagcacaacgcatttccacccgaaacaacatgtacccggaagacgtcaaagttccaggagctcacgccctgcaataaattctgcagctcgaattccgacgccgagtccagtgtcggaagcagctcccgcattgtcgttccccgatttccatgggacagtgagtgttcgtggtgatgtcggtgcggcgtctgaggcttcaccgctgcattgttgtcagagctgccgctgccgacatcgtgtccgtccacgtctgagtcggagctgcgtagcgacgatctccgacgcttgcggttgggaccgttcgggtccccctcctcttccgtaccgggcagcaccttgttcatatcgctgccacgcagcatctcgccgcgcagccagttctgcgtgtcgtcgtcgactccttccaccgccaagagctcctcgttggcatcgtagagtctgttgttcttgatcgcgtcaatggcgaagtccagcccgtccctgagcgacggacgaattgccgggtggaacctcaactcgttaagaatgcggagcacgtgctccacgggcgacgtgatcgcgcccttgttcaggtgcatgaggttcatggacttggatcgctgcttgacccgctcgaagaccacgagcacgcgcagcacgcgcaggatcacgcgcagcctcaggatcttcacgacgaccgcggacgtggtgcccagtgcggccacaacccccagcacaaagctgatgacgatcaccagcgcgtcgaacagcgcccagacgtcccgcaggtagggaaacccgtacgcgaacaccttgagcgtgatctccagcaggaggatggagccgaccgtgatgtccgtgacgtcgatggccagcttgtaggacgccagcgtgtcgtccgccatcgtgagctgcacggtcacgaacacaccgtagaacagcacgatcatgacgaagaacagctcgacgctcagcaggcgcatgaactcgccgaccgccagccgcacgcggtgcatggtgcgcaggtgcgcgacgccgctctgccggcgcgtcgtgaggtcgttggcgccggcgccgcgccgcttgcgcgcgcgctcttccgacgggtgcggcacgctgtcggcaggcgcgacggcgcgcgaccggcgctcgccgtacggggagcggcgcaggaagcgggagaaggtctggcgcttgggtttgcaggcgctggacggcgggtgcgccggcgccgacgcggacgccgacggcggcggcggcacggacggcgacgacgactcccccgacatgacggcgggcgtgagacgcgcgcgcaacgctgcgtgttaggtgaacgtcggtcggggcttgagacggcggcgcctgcttcagtttagtctactcggccctgccgcaggtgtctgtcggtgacggcaacgttgcgtggagctcgggcgcggcagttgaaggcgttgcccttgcgtcggtgtcttgtcggcgggctattgatagcgtcggcggcacgacgagctattgatagctaccgttgcctgcagttgtgcgcgcgaaggggcgtgaagagggtggaagtgcacccaaagaactttagccggcgataagtacgattttgcaatcgatttgcctcacggcggcggacgtttcggcgatcgacatggatcctggacggttgtctcgacgagtacaatagcggtgggaatgcctggacggggtgaacgcggctacattcattgcgggggcatcgctgggcgaatatgtagctctacaacaggcttgacctgcgtaggagcttgaagttgcactggtgtgcaagcgcacgcgcgtcaatcatcgggtcgggatcctgatggtgatcaccagacacgcctggcagagcaggcctgttggggaagtgaggacgccccggcatgtgccgcggacaccatgctgcagcagcttgcaggagcctcagaagcgccttccatctgggcggtgtcatctcatctagcactgcgcgtgcttgcgctaacgctttgcacggcaagggaccagttgccgagcgcatcaaagcgatggcccgaccgccaagcgctcgcaatgcaggacaagcaaacacacctccgcctgcagtgcagcagcacccttcgcgcccagtggcacctcgccgcgatccttcggcgcggagcgtttcgcggcgaatccgcgatttgaaaacgatatccttgaattgaagcaagtgacatgcaagcagcagcggctgccggagaatggaatgagccttttgccagcagcaatggactaccttcactgctgctggcgccgccgcgaaaactgcggcgcgcgacacggccgggacacaccatcgccagccagcaccgccggcgacgaccatttctgctatcagctctacgcagacgtctgtctcgccgagcggcggggacctttctcggcgggctcggcagcacccaacgcaggaatctccggcggcccaaatagcccgcaaataggccgcggcttccatatttcggcgccacctgggcccttttcgctcttgcttctactactatgcaacaggcgttgagaagaaacttccgtaattcagtggacgtcacccacagattaaaactctagtatacaagttatcagtagtgttatatattcgttaagttcctatcaaacgcactgaattatggaatttcctcggctgtgcgcccttttctaaggaaaaaaatgtgtcagggcttcgcccatacaaacgcgagtcagtcagctcagcactcaacttgaagggaagaacgcagacagcagcgaaatcccaccgaggcacgcagctccgctctcccgctctaccgctcgccctccgccctcccggtcacccgttcggggttgtgccgccccaccttcttctctactgaacgatgcaccgcacgcgccactcgtcgctggactacctgagcggcggcgcgtcctcgcaggaggaatggtccgagttcctgtccacgagcatgatggcgctgtccacggccgactcggaggccgcgccgcctccgggcgtggcgtcacccacgacctcgcgccgccgtcaccaggtcgccgacatcggcgccgggcgccgcgccgccaagccgcgcggcatgtcgatgaacgagacgctgtcgctgtcgccgccccctctgccggccgacgcgtggcgcccgcttggtcggcgcgtggcgtctccgcccccgacgctcacgcgctcggcctccagctcgccgcagtcgccgtcgccgccgagctcgtcggataaccaggccgagcacctgcgcgccgtggacgcgcatgtgacggtcatgtccacgccctccacgacgttcgggcggctcggcagcagctcgtcgctgcgaggcggactggacgccgcccccgacgtcaagttgaagcactcggccagcttccgcggagtcgtgagctcgtgtctgtcctcgtcggggtcgtcgttctacgactcgtcgtcctcggacgaagagcagcagcagcaggaaggaggctcgccgctgtcgaaccagttggacgccggcgccgtgccggccccgccgcccgtggacccgtcctacgccgagtcgtgtctccccgtgctctcgcagctcccgcgcccgccaagaagcatcagcgtggacagcggcagtggagcccgcgcaccctcgctagtgcacgtcaagtcccccgtgctgggtaacaggaaggacgcacagacgtggcagctgcaggacgaagagttcttgatgacgtcgccgcgctttggctcgtcgctggggaacagggacacaggacacgtcgatctgttccgtggaaacagcgtcggctcgctgctctccacgtacgttgctgtccctgttcaagctcggtgagtagagatgttgggtctgacctcgatttgtgttgcttttggttgcagtgagacgagcaaccagttcgatgacgagtaccaaggacacccgaggtgagttcgtgaaaggaagttgcctgcaacgggtgtggattcctcttctgacacgctagtctatttgttcttttgtgcattcagactaactaaagattcgcgcgcctcgtcggtggatttcactttgggacgctcgcacgaggtgaacccgccgctgcctccgccgcaggagcccctccaacgtctgcgtgcgcggtcgttctcgtactctcctgggtacggctcgtctgggtacaacccgttcaacaagcagcagtatggcgctccatctcaccaccagcagcagcccatgggccaagagttcccacagacacttcgcagcttccattctggaagtggtatgatgcagcctggccagccgcagcctcccccggcgggtattcgccctccgcgggtcagcatcccctcggattctcccatgcgccagtaccaggttcgtgtatttgccattttgattcgggatctacacagatcactaatggagttggatggctatacgtcttctctcccttgcttagtatggaccccccatgccgtatcgccggtactccgatgcgttcgcaatgccgccgtacccggattcatacaatggagaacagcaggagaaccagtcgcgccaaggcaacacgggtcgtggcatgcgctcgtacagcgtggagtatggcaactacccgtcgacgcggacagttcgcagtcagtcaatggagggcccacagctttttgcgtccgctccaccaatggagtatccgccatcgttgagccgcagcaattctgccggagtggccttcgactggggtcgtgctcacatggatgcagctcccccgctaccgcctgatgttcgccacggaagcggtaacggagcggcccactacccgccgccgccgcccgaggcatactacgacgtggagttcaagcgcgggcgacaagaggtgtttgccggacgtgctgcgtataagcccggtgaatacgtcaaggtatgtgaggtgttgatgatttcatagtgtctacaacattgagctgaacgctaatgccttgtctgtgcgataggtggaggcggaccgtggagaagacatcggccgaatcgtgcaacgcacgacagatgtgtcgaagattggctcaggaaatgagtccgggagccctggcgaggactccatggggcgcagcaagcgccacgatcttccgacgaagaaaattatttgtgtcgcaagcctgcgtgaatgtgaaatgcttaacgagcaggtgagcaattgtggatggagcttccttgcggtggggtgcttccgagtctgatactgaccagttgtgtggtgccggtgatgcagcgtaaggaagaacacgaagtgtttgaagtgtgcaagagcaaagtgcgtcagcgcctgctccctatgaacgtgatcgacgcggagtatcagttcgaccgccacaagctgacgtttttcttcgaagccgaccggtaaggattaatctcgcgaagattccgtccatagcggtgttggtcctgacagttggtgtgacgttgtctgttgtttccatagccgcatcgacttccgtgagctcgtgcgcgatctcttcgctatctacaagacgcgcatctggctacagcaggttgttcccaccgggaagaaggcggggaacgaacccgaggccaactagtcgcctgatggcaacaccgccggattgagagaggcgaggtagagcttttcgcagttcggcagcaatttatttcaaccgcccagcctgggagacccgccgttcgatatcacgaggtcggaacgcgacgacctcgaggccggaccatacatagacaagcaagaagggcgcggtccatccagcaagctcagaggcaccccaacccaactgcagcacacgaagacaagcacgactatcaaccccttacgagaaacacgaagcagcagtgagaaatgcagggagaggacatttagatggcgatttagacggtatgttagaactggtgacgttcgcgcgcaatagaatgctttcgcttcaacttgccccgcgacaggcgacgtcattccatgagatcaatgaattcaggaatcatcgaaagcgttctttctggttatcgtttcccggcacagatctactactggcaagtggcttccgaggggagtctagtggcctggagctggacacatttcgtctcttgtgtttgcaggcatccgtttccactgaacggagcaccttgaacttgacgtcggcttcaatggtggaccgagcgcgcgagtggaacgtggaggcagcaccgcgatggtttccccaaaaccgtcgacgccttcgactaactttccactgagggcacaccaacggacagacggcccttcatctcgctcattccgggatatcaaggccgcagcagaggcaggcatccgaccagcatgagagactacctccgcgagatcgacgatgagcgtggcgagacgccaacatttgggcgtgaccacagtccaaactcgaccgaagctgctgctgctggtcaaggtcgctacgtggtaccgttcaccatgtccagggaggaagaggctgtcgggatggagatggctcggtctcagttgccgagtttgatggcggagtgtgcagctgacgcaagtgatgatgcctggactcgcgtcaagtcaagcaagaagtcggcgggggccatcctctgggagaaacactctgataaagccaaacgaagggccaagaagaagaaatggggatcgaccggagcgaataaagcagtgtccgtgtcgacaggagacgataacgagccagtggtgtacggtgttcggagcagcacaacagtgaacgcaccgttggatatggtgctcaaaacactcgacgcctcggtggccactgcgcatcgctcgttcaccagaatcatctacgggaacctcgttgccgacacttcagtgcttttccatagctcgacgcccagtacagatttccttgccaaaactgagagcgacagtttggaaactcttgcggttcgctggttcgtgtgccgctgcagcaacccgatggtgtcggattgcgacttctgcctgcaggcgtacaccaagcgatattcgatcgatgaactggcaatgaatggagacccctacaacaataacgcatgggaagacgacaacagtgacgatgggcgcagtgagacccgcgaagggctccacccgagacgtgaaatgccagtggcgtacaaactcttccggtcgatggagacgcgacactgccccgagctgctcgagtctcaccgcgttgttcggtgtaaagttccattgggcggcttcctcttgtatccgaccgactgcagtgacaagaccgacgtcgtcttctacatgagcatcgcacatgatgcaagtggcgaccgaagcattcgtagtgggggtgcaggacgcaacagttctatggcaacgcagtgcagcgatcgacagttccgtgctctccagaacgtcgtgcgggaaatggcgctgcaaattggtcgcctggacaacgcgattgaatcgtacaagatgagtcttcatctcgagtctctgcggacgctgcagtgggtgcgcaacgccgagcgaactgaatgcgtcgtatgctgccgcagatttaaccaactaacgcgccgaagacatcattgtcgactatgcggcgaagtgatttgtcgcgaatgctcggtacacaaggacgtggatttacccacgttcggcccgacagtactgcgggtctgcacgggttgcgagaggattcactcgtcatcacgacctcaagcgtcctatataccttcacagacagaaccagaagtctccacgccacttgaaagagcacgaagacgccgcgcaggtcacgctccaatatctgacattcctacacgccgaagacgtagcaccttggacgaagattactcgaaaagtgatacgaacgaaagacaaacgcgagaagctgctgacaggagattcgtgacggctttaggtgctgctcaacgtcgaaaagcgaccgagccggcagcaagttgtccgaaacctacggcatcgcctgtaattgatcgtcggtactttgccaacaagtggggcgggactcggatgatgcctgcactgaaatcgcccgtcgtaacgacggcgcccacaactccgaagacgacgaccccatctccggttggaatgcatcggtcatcgtctgagaccttttcaaccccgccgctgcatcaactacacaaacatcagctctcaaaggatcgcaaagcgcccaaagccactggaactcggaccgaccacgacagcgaagatgaagacaagtttgaaagctatgttccccacattgaaaatgcgagtcccagcccagacggtccgagttcccgagcacgtccaatctacgccgtgaaaaatggcattctaacagataacaatcttgcaaaaggtaaccagcagcctcaaaacaatgcggggagttcaactcagctcaacgtgatcgcgaggagccagccacaggacagacctttagtatatcgcagcttcgagacgatgcagctttacgaagacattttcctcaagctctgcgagaactcggcttccgtgcggaactccaagtttgttgcactgacgctgtttacgagagcgaatccgtacgagaagagtcaacagaacgagatcgaggcaggagaagccgctgtctactacctgaaggtcaaaggcagcgccaagctcatgaaagttgcagcgaacttgcgctgctgtgatccggtcctccagttgcagaagtccgtggtcactcgaaacacgtgggcactggaaggcaagtctccaattcatccgtcgggcttcgatttccggctgctcccgatcgtcttggggcctcagcaggccagattctacgctggcgtgccgctgaccgacagcaagaaacgcttccgctatggtgcccttgccgtcttcgactctgctatttatccaggcgaagacgatgatttgcctatgaagaagacgctccaggctctgcaagtctgcgcgcgcgaggctttgatggccgtcgatgagagacgaaaggagcttgagctgcgtaccttcctgcaagcgcccttgatccagcttcggcagtctgagccagcgctacacctcagcatggagatctcccagtcaagtccgcgctggcgagacatcgtccaaggtgagcaggagagccttgacggcgacagcgacaccaacgacgacatcgacgaggcccagcgccgactcgagtacgaactcgtgaatgctcgaacgaagagcgaccccgagttctccaacactggcaacgccagcgtcggcaaatcccgcgtggaatacttccgaagcaagatgcaagagctcgtgcgacaagcccaggacacgcaggcgcaaatggccgagaacacgcttgtcatggaacgccacgccgtccccattgcctaaacagttagctcctcacaacaaaaatgcccgtcaggtcctcggtggcagtgcgaactacacggcctgcatgttaaaatctcttgtttcttgagctttctcacgacactctacggtggctgcaacaaggggctgagcaggccgctctttacttggcctcgaagaactcgtacgccttgttgcggaacgccagcaccttggagttccagccctcgcgcacgaccgtgtagtactcgtgctctcggctcggcagcggctcgtatcgctcctcgctgcgcgtcttcagctgcgatagacaggaataataatataagtgcgaggggatcgagacatcattgatgagggactttgcgtacgtgggtctcgccgcggaagctctccttgacctggttcaccgagtagagcacgacgccctcctgctccagcagctggtacttgacggcgccgtagcgcagaccgccgagcgccactccagccacgaacgcactcaacgacatgggatctccttcacgtcgaacttggtccgcacgtcttgcgctgcacgccgaaattagtgtattggtggtactattcaaaatagcactactattgtaacactactatattacaggatataggctctaaaatagtgatgcatatatagtggcaaaaacaagtattaatactaagcgaaacgattattactactactttcccgagcttcaaaagcctgctcctcgcgctagcgctctttctgtcatttggagtgactcatttcttgaatagcgggcgggtaaacagatcggtaaagtgcgttgtagttgtcgagggacatagcggagacttcaccgtgcagtatgtgcgtgcaccattcgtgttgcccatcgaggtagcgctgccgtaagtggtcagtcgcatccttcttgatagactaatacattccacaagcaggttccgctaccacagaaagctctgtgcttaccgggagtgtttaaggaacaaagctcacttataatagccccgactacaccatcgatcgatccaatgtgggagctcgtccatctacaataggcatacatgcaaacttccgatgtgtgtgaacgcgaagaccccccccccccgcgcgcgccttgtcgtactggcttcaatgagccaggtgcaagtgtcgggtgacatcgtgcgatggctgatcatgatccatgacggtgggtacttgaattactacgtaatcaaagctactgaatcttgctaaaaagcttgtgaatagcttggacctgtctagatcacggtgaatccctagctgacgttactggtcagcctctaaacttgctccagtttggttagggcgtggttttttaaacaacgtttcaagaagcactgagactttgtggttatgccactacgggcaaggactggccaagtgtatggtcagggatggttacactgcatgatatgcaccgtgaatggtaaaggggatagtaatattgtttcattactattatagtattacaatatgacatataatactaaattggttgtctactaacatatgtattagtagtatcgtatacgtgttagcatttataataatagtattataactactagtcgaaattttttaccaaacccagtcataagtctgggcggccactaaatcgtgcctaactatgctaaaacgctactgacaactcttaaaaagctggtcggttttataattcgtatgcaattggagcaccacctcactggcctatgtacgccagtttttggcgggtgcgtggccagccagtcagtccttgttgaaccgatgcaggcggaggacgtgcccatggaggccgctgcgcccgcgcaaggcgagccacaggtgccggcggctcccgcggaagagatgccgttcacggaggaggagatggccacgacgttcaaggtgctggaggtgctggccaagcgcaaggagctgctggagcagagcaacatgcgtctgatgcgcaagaagctggcgcccgtgtccgagtacatggaaggccgcaagttcggcggcgtaggtcgcaagaagtatctcgaggacaaggccatccgcgaggagaagcgcgcgcgacacaaccagcgcaagatgcacgacaagcgccacatcaacagctcgacgctgcgtcgcgagcgcatcgcaaagctcgagtcgctgctgcagcagggcaaggaagaccccagcaacctgctgcccatgatcgccgacggtgtggctggagaagacgtgtgccactcgaccaaggcgctgaccaacggccccgagccggagctgcagaagctctgcacggacgaggcggagcaggcgaaggaggagaaggcggcggccgagaagaaagaggcgagcgcgctgctgggcttccgctcgtgctacacgtgcaagagccgcttcgacaagattcatcacttctacgaccagctctgcccgcgttgcgccgagctcaacttcaccaagcgcttccagtcggcggacttgcgtggcaaggtcgcgcttatcaccggcgctcgtgtgaagatcggattccaggctgctgtgaagctgctgctggcgggagccgcggtcattgccactactcgcttcccgaaggacgcagccgagcgctttgcgaagcacccggagtacgagacgttcaaggaccgactgcagattttcggcattgacttccgtgacctggtgcacttggagcagttctgcgacttcgttatcagccgctactctcgcctggatatgatcgtccacaacgcgtgccagactgtgcgccgcccgcccacctattacaagccacttgtggacaaggagaccaaggcgctggaggcgagcaccaaggaggttcagatgctgatgaaccaccagcaggagttcgagtcgcacgtcaagtcgctggcgctccctgcttcgtccgacgccaaggctgtcaacgcaggcggcagcgttgtcatgtcgtctgcgttgaagtcgcaggtgccgatgatcgccggcgaagaccaccctgacgaccatgctgaggcattccctgagggcatggtggacgtgaacggacagcaggtggatcttcgctcgcgcaactcgtggttgctgcgcatgggcgaggttgccaccccggaggtggcagaggttttcgccatcaacactctggcgccgttcatcatgaataatcgcctggtgccgctgctggagaagagcggcgtgacggagaagaagttcatcgtcaacgtgagcgccatggagggcaagttctaccgctacaagacgccgaaccacccgcacaccaacatggccaaggccgcgctcaacatgatgactcgcacctgcgccgaggacctgagcaagcgccgcatctacatgaactcggtcgacacggggtaagatctaccgtcctattcacttgctatactgtgctgcatctgtactgaccttgagtgcttatgtgtttcgtaaatcgttcagctggatcaacgacgagaacccgctggtcaaggcgcacgcgcacgcccaggcgcacaacttccagacgcccatcgacgagatcgacgccgccgcgcgtgtgctggacccgattttcgtcggctacaactcggacgagaccatcttcggcaagttcctcaaggacttccacgagaccgagtggtaggcgggcggttggttagatttgccgcttgtaagcgcatgggcgccatgatagagagatgcactttgctacacgtaccccgacgtcattgtagttcccttgcaccctgtgatctgattggttatagcacatcggtacaccgtaccattcggcatacattcaaagggcgcggtgtaagcctgctcgcgatccgcgccagaaccagatttgccttcaagagcacaagtgatccccagaccgaggcagcaagaagatgaaggtggacacgcgcgtggacaacaagaagtacgggctcgcggaggagagcaaggtctggtgcgcggtgcacccggtgctgcgtcacaagctcaccaagctacgcgacgagcgcaccgacagccgcgttttccgccacctgctgcgagaggtcacgttctacctcgggtgcgttgctctgctctgtggatgaataagatagagagaccatagacccattaataacggcgctggtcgatgcctacgtgcaggtatgacgcgacggatgatctggagaccgtcccgaagaagatcaaggtgagataaggggaaggcttcgtgcagaaggatgagcagttactgaataagatatgcaacgttggtgtgggttgtcagacgccgaagggggagcaccaaggggcggagctgtccacgtcggtggcgctcgttccgatcctccgcgcaggtcttggaatggtatggtcactattccatccaatgtggtggtcaaataccacctttacctttcgctaattgttgacttgctttcatggtgtaggtggagccgatgctggatgtcttgcccaacgccactgttcaccacatcggtaggatcgccaactctcgtagtttgtgcggattaagcaaagggggaacactaacgatcgcttttaccttctgtaggtatgtaccgcaacaagcagtcgcttctgcctgtacagtactacaacaagctgccgaaggagtgcaatgccgacgttgccatcgtcctggagccggtcattgccacaggtgagtgcatgaaaacgagcaaaggaccttacaggtcacttgctagtgtgtgaatcaagcccacaactcaattgctatgacttgacgtgcgttcatatccgcagctggtacgattctcgcaacgctggccgtcctgaagacgtggggcgtagagaagatcaagatcgtgagcgcaatcgcgtcgaagcagggtctgcaggaggtgtgcgccaagaacccggatgtggagatcttcctggcagcaatcgatgacgacctgtccgaggtgcgtagcgttgcgcagctagctaggatgttgcttcaagatgtttttgactgccgcgcacgtttctgaccgctcgcgtcttgacaggatggctacatcctgcccggtctcggcgacgccggtgaccgcgagttccagacgggcgcgcagctcgagaaggtggaaaacgcccacaagaagcagaagctgtaagacagaggaaggcaagccaaggccttccacgctcagtgtcgatcgcagcaagttgcagcacagcaagttgtaggggtgggtaatcgacccaatcggattgatcgagatgtactttctgaccgatcggattagccagtgccgattctcgattcatttcgggttagatccgattgatcggtcgatccaatccgactaccaagatataaaatacagcagtaatacctccagaaaatgcttctctacatatcgcattcactacatgaataatttttaagtgacccctgcaatgaccaatagcatgtttccactctaatctcttatacattttatcatgtccgaaactataaaataccacagacttccgtacaaccgacgcttcacagcaaaagttcatgtgtggctttagtctgctcacgatagtgctggtgttatctataacagggacttgacgtgcgctggattcgcgctgaaatcggcctgagacttaatcgcatgcggacctgagacaacatcggtatcattggcacagttctcgtagttctacttgttgtccaccaactcgaccaccacatttaatccgctcagcgacagccgaatctgcgacttggcggtgcgcggcgccaacaccacctcgacagccttccaccagctcacgttacgcgactgaaactcggtaggcgcctcccacgcatcgccgccgctactgctgttgctactgctactgctactgctgggcacgcactacagctgcgcgaaatcgttccagcgcgtgaccgggtgctcacgcactttacgatcagcacaacggacgcgccaccgctaccttttgagccccggtacggaatcccagtgcacctcattactgggcggtgattcgtcgcggattcgcagtaaagcaattggtccaatcaggtgtgcacacgttgggcgtctgcttgaagttgtcgatcgaatcggccgattcaatcggatcagatcggcttaggcctgccggaccttgcgaacttcgcaatgcgaagtagtgcatgcgcagcaatcttcctcgcagtttcgcctttgccatctcgcactaacgcacctctccgcataccttcattccatggagccccaagacaattcaagtgcaagttcatcctccagtgaaccaaggcgagctcctggtaatcgacgctccggcatctggaccttcattcgcgataacagcgatgggaccttcacctgtctgctgtgtcccaccgactcagctccggtctggaacacggtggctcatactacgtttcggcgacacctgaagcggcagcacggagaagagtacggaggcgacgaagatgcgtctccggcggacacgagaggcgcccgccagacggacttgctcgcgtttgggttcaagcgatacgtgcggcagcgcacgttcgacaaggcggccgctgacaagcagctggtggccttgatggtagcgaacgcgctttccctgagtctggtggagaaaaaggaatttcgttccttctgcagaacacttcgccctgactacgtgcctccgacaaggaagacggttcgaaagaagataatggcgcgctggaggtgcgaaaaggagctgtcgcggcatagcattcttcaagatgttaaaaactgccgggtatctgccgggtatccgccacgacggacttatggacaccagcggcaaaacgaggctacatggttgtgaccatgcattgaatcaacgacgagtgggtcattaagtcggttatgatcgggtttacgcgcgtggagtatccccattctggtccccgcatcgcacagcatctgatcgataccattcgagcgatgagcggatctctttttgcaaaactatgggcgatcactacggataacgccgccaacaacggaacaatgattgatgagatcaacgaaacactggaggaggagattgtgggctacgaccagcttgcagggacggcttcgggtgccacctcgactccagagcctacggaagctgccgcatcccaagccaaggtcgttcatgtgcgatgtctggcctacgtttttcaacttgctgtcaaggaaggccttaaacgatgcccaatcatggatgacagtgttggtgtcatccgtgacatactgaaaaaactgtcggagtcgccgtcgttacttgaggcgctgactgatgtctgcgcggcactcaatgtgacctttatatcaccggagctcgacgttgtgacgcggtggaacagcaccttaacgatgctttcttcagctcgttcgctgaagctagcgattggtgagttacagcgacggattcgtggccgtcatgaaggcaacaaatgcctttcaataggccctggcgatcgtctatcccggacacgacttggggctatcttaatgagctcatagctttcctgagaccgatcaagggcgcgactacactcatgtctggcaagaactacccaacctttggtgtagcgttggttgtcttccatctcgtcttgaagcatgcggggaagacgacggagactgctctctcgatgtacaccaaggattttgctcgcgcgttcaagaagaagcttgacgagtatatcccgctcgtcaaaaccgatgatgctcaaattgctgccgttctcggccctcgtgcgaagtcgttcctcgtcaagattgacgtcaatggcgagcaagtgaaaaaactagtcgaagcggagtataaacgcgtgtatcgggccccatatgagcaaaatgaactgcgtagaaaacaatcggagaaaacccagcagcagaaagaagaagctgaagacgaggacgcgctgtacagccttattgatgagcacattgggcacgagtcgcacgcaaacagcagtggtgagtcattttcaagtgagttgtctcgctggcttgaccacaaggataagtccatgaacctgaagacaggcagtcgagctgtgtgcaactggatggagcacgaagctgcctcatttcctcgaattcagatgatggcgcgcgattacttggctgtgatggctacttcggtgcctagcgaggaagcattcgctgcatctggaacgacgattacgcctcgacgagctcgacttgctgacgatgctgttacagcgatcatggagctgcagcattttcttgccttcaaccttacctcgggtgatgtccatgctgaaccagtagacattaattggactgagagctagtgtgttggtggtcgcagtggctttaagtctgtaagagtcgcaatcgttcataatgctctcgatccaattcgcctttgatgagctctttgcattaatgacgagtacatagcgcttctgctgcaacttgatatgtggtaagcttttgtaaagcaaccgcgttgcactctaggaacacgataccatttttgcgcagaatcatctcaaacgaagtctggctcgccgccttggacgagctcgaagagcatgtatcaacatcgcgtggcatgatgcactcgctcacatggcgcacagagacaagcggataatcgtgccgctgtgaagttacaccgcactcgaagccttggaaaacgaggcgaagcgctgctcaaacaaccacaacttctgtgaggcggtcactctaacgaaacaaggaggagctatctccaattgctcaatcgcaacgaggtgaaacgctgtccgataatttagcacctgaacacccgatgcaacgaggcgaagtgctgccgcaatttgaagtggttcgaaggtgtgtatctccaatcgaaacgaggcgaagcgcagctccaatttatcactccatggggtctgaatcagggatgcgaagcgctgctcgagagtctccgcagaggcggagcgttgcctgataattttgcgactgaagaggggcaacgactaggggaaacgaggcggaactgtgcccgattgtgtgcgatatcaaagtggcggggccactgttgtcaaacatgtctgcttatccaggcaggttaacaatgttttcaacgcagatatcgctaccgaaatccggttgtcggactcaaagcctatctggctgttgtttcgtgcgaaatgtagtgacgcaggagggtatggcgacgaattttaagcgactgttcgttggttgcgtcgctagaaatgacaatcttgcgcatgtcctacgacttgatcgataccggcgcattgacgccgtattgaatgtcaagtgcgcagcagagcacgacaactcaattctttcggtgatgtcgaagtgatggtgccctcaccgtgtttcagggcgaatatgagcgggtcgccgtctcaacaagctgaaagtggaaaatcgcggaaaacgagcagtggggcgattaggtagtggttcctcgctgagactgcgagctatttcttgcgagcaaatacaattaatttgtggtggtcatcattacctgtaggatttcccagcaacagagagaaccgggtagctggtgcttggtattttgtggcttccagtttgtctgtatctgcatcagctgcattagattttgaaaatcttgtattgttttgtggttattggcgaactatacggctatctcctggtgattatgtttggttgtggtggtgatgcgataatttcgaaccgtaaactctcgcgttggacttttgaccacggaatttgcagcttcaagccgggttgtgctcacgaaaatgagcgtatttgcttcgcaatatcagcgaattcatgtcttgtcgactcgagtcggctggttttagcgtcgttaatcaattagtggcaaggtcttgcgctagaccagaccgtgaacctagtattcaaagcacatgcaagtctcgaggttgtcccgagtccactgagtcgcaaattgttatcgtagcgtgctctgagagtacacaaatgcgtttgcttgcaactcgaacgcgcccagtgtcttcaattattcttgattcctccatttccaattttaccggcttccgcacaatcaacgtactctccgcaatgtaaaagccatcatctattttcctctgcaacataccaaaactgatggcataacttccatacgcctgcgtcattcgtgcccagcacgcctacgaaaggcttaacacaagaatcccgaacaacaggccaaatcgcttctgtgcagactttcaaccactttacaagctttttttttctgaaacgagaacgtaatgctatccattgattgacaaaactgcactttggaagcaaaacattcctacagctcctcgagatcctcctacacgacccacctgtctcctctgcggacaatgccaatggctgaggtgtcttttccacttgcttgcttggcttctggtacatctcgcgcagcttgaaggtaatcaggcggtcgcactcggcgatgatgcccttctcgtagatgacgttcttctgcaggtagttctcaacgatcagagccttgagcatgcacttgagcgcaagcgcctggttcgtggagccgtgacgtgtgattggcacgcggacggagacgtcggtgcccctggcacggaccttgtacagggtcgtcttggccgtcggagctgtggcgggtagcggatctcgctcgcgcattgctacgcccaccgagaatcgactgttgcacgagctgcgacgctggttctcacgctgcatgttgtagttaagcttgtccagaacctgctcgaaggcggcacgttaaagcgtgacgcttcacttgaccagcaatgacgcaatccgcagcgcaaggctggctcgccagtagagcgcattcagcaacacaaaaacccgttagctcagctattcacacacacaccaccacatacacaaagtggcaaccaacgtactgtaagtctgccacacggtcttcgtgtcgtcaagcgtctggcagccgatcgagtagaagcgcgcatcatcttgcaaccgccgttctcgcacgacaagtagtcgatggaggactcggtcttgacgttgacgttcatgtggctgtactcgctgtagcaatcgtccgcgtacagcaacttcttgtcgccgagtcagaactcgcacgaacctgtgtggatgagaccgtgagagaagatggcattggcgttggtcggaataggctgcggcgtgccgttccggttggtgaagctgcaggccgcgtcgtacagcgacatgccgtccagcatcggctcggggttctttgcagatgttggtcgccttggggcatttgaacacctcaacgcccttctgggtgttgccggcctcgcagctcgcgaggccagtcgcaggtgtggcgagaagcgggaggcctcttcgtttttgttttgtgatatcgactattgaaagcatcacatctgcgaggggcaatatcatcccagtttcaaccaatgagtccgtgtttcgtcagctatgtcgatgctttgtcgactcgatccgatccaatccgatcgagtcggcattgatctacaaatcagccaatccgattaaatgcgatccgtctcgatccaatcaatcgaatcggattggttttttgctacccatccctagcaagttgaagtgctctttttcaaaaataataatacaattttcccaaaatctcccattcggtgtggtacacacagacatctcaacctgaaatccattgtgaaaagttgcagcgggatcatgaccaagtcggaggtgccggcgctgctcaagacgcgctccaaggacccgctcgagagctcctggcgcaagcacatggtgtggtctccatctccacctcttcctcttcttctccgttgctaatttgctgtcctgtgctgcgtagagcgatgggcagtgggtgccggacgtctccgtggacacctgcatgctctgccgcactgagttcggcttctggatccgccgccaccactgccgacgctgcggggccgtggtgtgcgacggatgctccggcagtcgtaccaagttcatctacaaggcgggtccttagactgaaggagagcctgctggctgcgttgcgtactgtgctgaccgttgctgtggcgatcttgtgcgcaggagatcaccccgaacaagctggcggacgaagactgccgcgtgtgtgacgcatgcatcagggtgatcgacgagaagctggcgctcggcgtgagtcggcgcttcggcaagggcgtggcggctgcactagccagcgagagcgacaaccagcaggaacatgcggcggcggctgcagcgccaatggagccggacaaaggcggcaaccgcacggtgatgaccatgggcagatacaggtgcgtacgcaatatggggctggggatgtttgcctggcagagatcagagtctaactcgcttgtctgttgggggtagagcggagatcaaagagtcggaaggcaaccggtacattcgcgacactgacctgtagtctcctgcagcttacaacgagttacgtaccgtgccggcttgcaacgggacgcttagtgcctatgatacgataggtctctcgagggtatgaaagccgcaacaaagtgcgtgtgattttcttatcggcttgcatctcttctgctcgttgctccacgtgccgcacaacgccaccaaaaatccgctacaacgtgcagataagtcctgcctccattccacctcagtctcgacgtactcacggaggtgacgctacagcagcctacagcacaccttctacgagcccgagctcgtcaacttcaaaagtgggctccccctaaatacgagagccaaaagtcgcacaaaacgggctccctcatggtaagtacgagatcaaggagccctggttcgggctccccattggctcccctccagggctccccaaatttagcttcaaatctatgacgggctcttcatagtaatatctgattggccaattttacctagacttaaggcgagcaacttcgcgtgattgatgcgccacgctagaagatcgagctcaaagatcaccacactagaagatctcgcaccgctcatatgtggacagccgctccgaggccaccccagcgtcgccgatcgtccttccttcccctcaaggagaagccctctttcctatgccttttcaggttagaacctggagatacttcaatgacggccaatcatcagcgagatatttaacacaggtgagggggagcccttaacgagggctcacagttctggagggctcctttcacttaacctattgaactcaagagcccaggagcccgagctcgcgactttttgggttcacccaagagtccccagggctcgtcctacagtgccatacaaaagcaccatgacttttctgaacttggcggaatccacgcgtttgattggcgcttcatactcaggccaagtgtggatgggtcgactgcagcagtcagtcaccagttctccagcccagtcacttgtgtacaggcggaaggaagagctgaagcaggggaggaagcgctgcgttcttctcgttctctctttctatcttctcttctcttctgctgctgcttgagccctttgaccgggccgcctcttttctgcgtgttactgccggctggcttgcagcggctgccgccgagtcgcgtggacggaagccgcagcaacagcagaacgccgcaccaagccctcggcctacttcacaagcagggagcgaggatcctcctgtgtggccatggaggacgacgcgcgcgagccgattgaggcgctggggccgctcgacgtctcggtgaccgccgcgctggatactgaggcgctgctcgcccacgacgagacaagcgccgctgctactggagacgaggagttgacggacgacaacgagtcaatcgatgggacggagtccgtcacgtcgcgcctcgtcatctccacgtcgggccgcatcccaggctccaagttgcgcacgcccagcaagatctcgcgcatccagacgcccgggagaaggtctgccacgtccgcggcctcgcccaccaccaaacagcgcgccgcgaccctctcctcgaccggaggacggctcggaatggccgccaggaccacgccgcgcgccctggagaagaaggtgcagcgcgtgggcatgagcagcgacttcggcccgcgggcggccgaggactcgacgcccaagcgccagtcggcgctcgaggcccgccgcgcgtactcggcgtccatcaaggcgcgcatgcacggcgcgtcttctttcactgctgccgacggaagcagcggcggcctcaagcggaccaacagcaacagcagcatgagcagcatcgccagcagtgtcaacagcgtgtcgtcgctgtccaagccgcgcagcaggacgtcggctagcgcggcggcggagaggaggaagacgctgcacgacttggtggagagcaacaaggagaaccgacgcagcagtctgggctcgcagtcgtcgtgctcgtccatctcgtcgtccgcgacctcggcgtcctttgtgtcggcggcgtcgtctaggatgggctcgtccaggttgggagccacgcccacgcgcaagagcactcgggccagctctgttacatcgtcgtcgtcatcggcgcgccataagccaacgtccgctgcccccaaggtgtggccggcgtcagctccgtccatgtcgatactgccagaggacttcacgttgaacgaggagtcggtgatggctctgagggaggaccatgaaatggcggagaaaggggtccaggaactgctggagtatgtgtcgacgaattctacgagctcagtggccaccgcggccaatatgaaagctcgtcttgaggaggtgaagctgctcaaggctgggttaaggaggctgagctctcacagtgaagggctgatgcggtgctgcgaggcgtttgagaggaggacattggagcagaacgagtacgtcgacgaatccgccgcggagattgaacgactgacacaattattgaactcggagccgagcaagcacaccgatcactccaagggattactaccagagctcgacctcgaggacttccacagtgacggccctttgtctcgatcaccccatccgacctcggactcggagactgcgtcaactacttcgtcgcagaacatcttcccgagaatgtcgagtgaagaagctgatcgccagcgccaagagatccagcaggcgatgcaggaagactcgccgctgtccgcattcgtgcgcaatatcttgaagaaggcaacggacaagattgaagacaagtggaaaacccgcttcgcggagcaattggcggagcacgagcaggctttggcccaggagcgtgagcgcacgtcggcgtcggtgctctccagctcgcgtcttgtgaccgagactttgcacggcaaggatgacgagctgaaggccattcaggagctgaacctgaacctgaacatgcagaagcgtcaactggagttggatctggatgccgctcgctccgagcttgagttcctaaagcagcaactggatgacgacgacgacgagcgatcagccaacgctcacagcttctgggagaagaccacggacttggccaagcagaaccgcaatctgactgaagagttgacgcaagccaacaagaacgtgacccgtctcagcgagacaatcaagatgatgaaggcgaaggcgtcgagcttgaaaacagaaaacggcgatcgcgtgcgcgagtccaagtctatggtggcggagaagaacctgctgcaagataaattggcatctatggaggcgaagtttgaggacgagaagaaccgccgtgagcagttccaagttaacgtggagcagctgactgtcgaaaacaccgcgctctacgcgcaaatggtggcgctgcagacgactcacgaagctaagatggaggagatgcaggcccgctacgagaagcggaatatctcgctggtcggtgagatgaagctactgcaggaccaaaaccggctgatgcgcaaagctgagccaaccaaccaacgtgaggcgcgtggaagcagtggttcaatcggcgggtctggatatggtagcagtaagagcgcaggctctccatcgcgggcagatgatgaagaaacgacccagcgtattcaggagttgactgacgacttgctcgcggcgcgtcaggaaattacagagcaggcagatatcattgcggagctcgagatgaagatcgctgaaggtgaagcaatgcgtcgcaagctgcacaacaccatccaagagctgcgcggcaacattcgagtgcacgtcagactgcgtccattcctgcgctctgacggcgaggaagcgttggccgagaacccacagtccgccattatggttgacaccttcgcctccaccatcacgaccaacgtgggcaacccgcacactttcgcattcgacaagatctacggacaatccgattcgcaggagttcgtattcaaggatgtgtcggacttcattcaatcggctatggacggctacaacgtctgcatctttgcgtacggccaaacgggttccggtaagacgcacacgatgcaaggaagcggcaaggcacagatgcgcggcatcatcccgcggtctattgatctcattatcaactgctgccaagagctgacgctcatggggtggaacttctcgctgatggtgacgttctacgagatttacaacgagaccatccgcgacttgctgactatggatagcagcaaggatatcaagcacaacatccgcacggacagccgtggccggaactacgtggagggtctgaccgaggtctacatcgacttcgaccaggcagctgagcaggtggatgagatcgtgaacctggcagcgtgcaaccgttccgttgaccgcacggacatgaacgcgcactcatctcgtagtcacagcatcttcgcgctgaagatccagggattcaacgaggcacaaaacacagaggtcgagggaagcctgagccttgtggatcttgccggtagtgagcggctgagccgatcgaatgccacgggagaccgactgaaggaggctcaagccatcaacaagagtctgagcgccctagccgatgtgttccaggctctggcgaagaagtcgcctcacgtcccgtaccgcaacagcaagctcacgtacgcgctgcagcccgcgctgtctggcgacggcaagacgctcatgatggccaacctgtcgccgacgtacatgtccctggacgagtcgctatgcagcatgcgcttcgcccagaaggtgagccagtgcgagctgggtgctcccgttcgccagatcaagtcgacgaggcgccagtcgcttggccctggggacctctctcgcaacagcatcagaagctcaccttcgcgtgaatctcgacgaagcacgttcactccgggtcagctgaggaagctgctataaggagtgctacgaaccagctttctgcgtgtcaattcatcagcccgacgcagtggcacacgactacttaatgctcgtcgaactggagtgccggaccaagttgcgagtcgggaagaaaagcaagaaacaatatgcacatgtacaagcctccacctgccaagtcgcgcagtcagccacgcgtgaaagctgtactatcgccgcgcgtgctgtgccttacggggtcgtggaggccctttgattttgtgaatactaaagtgcgagaaaaagaggaaacgcgagccaagttgagatgaatgagctgcctagcaacgttaaaataaaagcaggttttcggcattcagtgttcgtttcgttactggtaggtgatcctgtccaggctggaagacttgagagaactcgatcactcggtgtgctccttgggggcaggcgggttcaaccacccgaagtaggagactaagcgagccatgtacacagcggtgcagagtacgcagacgaagagcgtgacaacgtaggcaccggagccttcgggtcctgatggaagagctcccttggcgtcatacgctttacttgagtagccgtagtccagcgcgatcgggaagcccacgatccaccacagcaggtgcgttgtaatgaggttgaacgtccagccagagttgtccgtgacgaagtggatgatcgacttggccggagccgcgggcatgctggctgcgtccatggtgcttgacaggaatgcagatcaaagaggcggcttggcttcgcgcagcgagtcttggtgagtgagcggacggatgaatatcccaaacgaggcgccgcttcatgtagcgccgtccgttaccgatttctgtgaaacgatgccacgagtcccaaagacaatcctggagatacaaatgctcacctctgctcacctgccaatttcaagccacagctcccctgcacagacgcagtagcttgataggcccattgcagcggaatctgggcacgcagcacaaggtgaaaccaatacgaacgagccaacacgctaccgttcatctgcatcgcacttattcctcgagtttacttcttcttctctgagcctggggtaacatcccacgcagtaaggcaaacaaacgtgtcgggtttagtcgcgctcgctgatggcagtcaagtgcgcctcgatctcgtcctcgggcagtttgcggaaccgctggccctgcaccacgacgcccacctcgatctcgttggggcggaagtccgccgacagcaccgactgcaggcacgtgatggccgtgtgcagcgtcgtctcgtagtccatggccgggttggccttgatcttcttctcgaggtagttctgtgcctcctgctccttgacgcccgccgacgtggccttgtagccccagaagtggccggccgggtcgatcttgaacagctgagggcccttctcatcgtccacgctgatgagcatcgtgacgacgccgaacgcgcgcatggacgcgtgctgcgtgtacacctgcgccacgtcggcgatgcgcttggccagcacgtggcacgggatcttgtagccgaacttgttctcgaactcgtgcgcctcgtagcggagacgctgcacctgcgccttcgagtcggctgtcacaataaataaacaagcaattagtccagaattttcagcattttctgcagcattccatcagcaacacaccgtagagtcccgtcatgaggcagccgatctcgggcgtgatctggaacacattcgtgaccgagtcgggctcgatcagtttgtcctagcagcagcagcaccagcaataaacagctacagtgtcagatccagacctcgtggccacagaactattagatccgcgggctgtaggctgcttcttcacctgcactttcttctgggtgacgaagacggcgctgtccttgccgcgcacggccacagacgtgagcgtggactccttggcggcgcggaaggcgtactctgctcaaaagatccgattgttccagagataagtgaggccgatggcggggaggaaagcgctgcagacggcggattgagcacgcaccgatctggtagagccggccttccggcgagaagatggtgatgtggcggtcgtatccgtctccgggcatggctctggctgctgcgctgcggcttcgacttggctgtgtcgatcctttttggtgcttctcgcttttcgcctccccctcgccttttgcgatccagattcaattaagtacgaatgttaacgttacttcaggagttaatgaaacctccgcttagtaatatacagtcgtgaatacaaaagcaaaagggggttaacaatggtaaaggtcattttgtaacaagatacatgctgtcgagcaaggtttatccctcagcttctgccagcatgcctaacttgtcactaacaggtcatttcgacacgattattgtacaggaggagtttggcgagaagacttgcacgcgccacatccaatctcttccgcgttgtgcccaacaatcttaaccaatttccactaaagccaccaaactatgctgctttagttgtcccgagctctgtgtaacgatacgatagtgacagtagactactgcagcttcaacatctgattaactataccaatagttccgggtcgatcttgttggcatcttgcttgctctgaatacccgcccacttggtttcaactgctactatacccgtggcgatgtattctccgctgacttgcgacgagcaatagcccccaactatggcgccgcagattgtttttggagccaactgcccgccctcgtcattttgagggcatcaggtcgacggctgcgctaccgttatgggatggcgttcctgggtcctgcttcgcttggcccgccatttccttatttcatggtgaaatcttggttctaacgttactgttacttcacgattttttacttccgcggtgcgtcatccacttcaactctcgcattcatttgccgattggcggcctagagcacaagcgagttccatccccatggcggagctgggcgtgacgcgagacctcgtgggctacggcgcgcgcgggttcgaccccaagtggcctggcggcaagaagctggcgctgcagttcgtgctcaactacgaggagggcggcgagaactgcgtgctgaacggcgacgccgcgtccgagcacctgctgtcggacatcgtgggcgccgcgccctacgtggggcagcgccacatgaacatggagtcgctgtacgagtacggcagccgcgcgggcttctggcggctgcaccgcgccttcacggagcgccagatgccgctcacggtctacgccgtgggcctcgcgctcgaaaagaacccagaggcggcgcgggccatgaaggacgccggctgggaggtcgccagccacggataccgctggatcgactaccagaacgtggacgaggccaccgagcgcgagcatatccgcaagacggtggccatccatgagaagctgctgggcgagcgccccgtgggcatctaccagggcaagccgaacgtcaacacgcgccgcctcgtggtggaggaaggaggcttcctgtacgacgcggacgcctacaacgacgacctgccgtactgggacacgcagttcggccgcccgcaccttgtgatcccctacacgctcaacaacaacgacatgaagttcgtgtctgcgcagggtttcaactccggagaccagttcttcacgtacctgaaggacgccttcgatgtgctgctcgccgagggccgcgccggtcagcccaagatgatgtctatcgggctgcactgccgcgtcgtgggccatccaggacgtatcgccgctctgctccgcttcctagactacgcgcagagcttccaagacgtctggatctgcaaacgcgaggacatcgcgcgtcactggtacaagacgcactccccgaaagatgctgctgcttcgaagctgtaaatgggggagggtgggaagccttgtagtagtagcacgtgctacggactctgcacgacaaaaccatgcaatgcaatggaaaaagcgtctaactagtattacgcccactattcttcaagtggtcaatttgccgatcccccggcgtttggacattcttctctgctcagcactcttttcttcttgtaaatagcctatctgggcacgatggcgctcgcctcggcgccgttgacactgctcgtgttgttgctcaatgtgcgatcatttgcaagccacgcgctctccgaatctgcgagcgactttagttgggccagaatgggtgaatcttgtgttgggtccaagctacgtgagaacagaagctaacgtcatgcatacaaaccacaacgtcagaaccacatcatccgctaatctcccacgctataaactcgtacctgctgcacgttcctgcgaagaaagcggatggctttctcgtggcggtctttatcggcgcccttcttgtacagagggtactcgccttgagggtcgttgatctcgtccttgaggaatgaccgcgacgagtacggcaccacgcggtagcggaggttcacctggagatacttgctcagcatgaataccaggtgggcaatatagcccagagccgtggagatcatctcttcgtcggtcctgccgcctcctgtgaggtccgagttggcgatgcgaatgccgcggatgctgtactctccggcacctacgtactcgatggggtacacggtgccgagctgccttacgagcacggcctgtcgagatcggatcttgtgggcagctcgcaggacctcgcaccggcgatcgaggatattctggcgctcttccttgtagcgcacgctcatctgcatggtactcagcagcgccttcgggatgtggatgtccgtctcaaatgttctgcgctcgtcctgcataacgttccgtagccgctccagcgtgtgtcgttcgtctgctacttgtgctcgcgcgaggcgaacgcgctcctccagtgccgcccgctgttgttctctggcgatgcgttgctgcgagtgcagcagtttgttgcggatccgctccttcatctcggcgttcgtcttcgtcaactccgcgatcttttgtcttgtcgtcaaaatcttttccagcgcgtccacgccttcgtgcaagctgtagtccttgagggggatgaccgagcctttcctcctcgagtgtttcggcgcaataaccccactttcagccagaagctccagtaccatgcgatgcacgtaaatgtggcccgaaaactcaaacagacaagtgttcagcggcaggttcgagaggtccgtcagcgctacgggcagcggctcaagctcccgcacgccgaagctgaggctcagaatgtcctcttcaaacacgtcgttcgccgcgctcccgttcgagctgctcgcgtggctcggcgtttcggtgtccgtcatggcgtcattggccccggagtcatcggcctcgtcgaaactgtttttggcgtcggcgaagcaccgcgagttgttgatgggcgcgtcgtctccgaacgacaggcggtcgctcatggagcgcgacttgcggcgcggccgcttggccgtcttccggtcgtgcacgcgcaccacgacgatgtcgaacctggtgccgccgctgagcagcgtctcgacgcccgcaagtccgccgtcctcgtcgtcgtcctcggactggaagggcacccacacggggttcagcgtgttgcgcgccacctcgctctcgtacaccacgcggccgtccaccactgcgatagtcacccccttgtgagcaacaaatagagcattgtatcatcgatatagcaggagaataccctacctagcttgaagtagacgttgagcagcgagccgccgctggtgccgtggacgctgaggttgcgcatgctgaagccgctgagctgctgcagcgtgacggtggccgagcggcccgcgggcggctgcgtgttccaggcgggcgggatgctgctggcggtcatgttgatggcgccgccgaagctgccggcgatgctggatggggtcatcatggcgcggagcgagcgggtgtcgacgcgcgatagccgactctatctctctacgacttgtgagagcggcggcggtggcgtatgggcgccgcgcagacagtggcaagccgcgctcgtccgtggcggtcgctctacgtcgagcggcggtggcgatggaacgaagagggagagtcggcgccgccgggctcaattgcggccaccgactgcacgcttctcggcaccgttcgcttccgaggggggactgtctatagacaccggacgcgttcgaaaatagagtgtactcgcgcgattggacgaaatcgagtccgagtttcggccagtgggaagcgaggcaacttcaacttggttctggcccgggaacggctaaaggcgatgccagcgtgcaagccgttagggcggctatggccggaggccagtggatggaggtagctgggggtaagtcttgccgcgttccggccgctgaaggtgccgctgctggcgtgtggagcccagctcactgtggtgtccacaagccggcgtgctgcgccgctacagaatcagtcggcagctgtgcagagcaaagcgttcaatgtcggggatgtctacggtgcgctcgttcgtcacggtggtcatcaagcgtacgagacgatgtggtgcccgccataagcgtcaccacttcactgctctgagccctgcacagagctgagctgcaggctaaatcgaggcaaccagcaagcacaagcagctactggcgattggcgcaggggtttcgactggtccaacgtaacctgcaacttcaacgtgcttgcccaaaccaaagcggccgatctgcccgacgatatatttttagcgtgttgcaagaaactgcagtacagcggagagagagaggtccgcgctctcattggagacacttccgaactagacgcgaggcgcgcagaccctaagcgagcgagcgagcgatcttgagctgcctgctagcaggagctaccttcaaggctttgcgtcgtttttagccgtttcggagtcgctcccagtgtgaacgctctggctgccgggcgagcaggcgcctaggcctactgggggacagggcccgcccatggtggggatctcagcgcgtcgcagcgaagactcgagcccgacgcccaagaagctgtcgcggcacctgctgcacctcgtcagccgcgcgcagatgagtccgagggaggccggtcgcgagccctcgcgctcgctgtggcgccaggcgctgctctggccctccagtcccgcgatcctcaagaagaacgctcgcgtggcggcgctagagcgaagtcgtagggccaacagggccagtagcaaccagcacgagacgcaggcgtgcgctggtagtgtcagctgcagtgagattctagtgaccgacaacagctcaggcgcagaacaacagcagcagcagcagcagcagaacgaccaaccccagggtgagacgctgccgaaagaaggcagtccacgcaaagtggtcacggatgaggacaacaacctccacgatctcagcagctcggtcaagaagctcgcgcttaccggcctccgacctgctgcgaagaccagtgtcatccacccgacctcagccgcgtcgccgtcgaaagctctgcagtcggtgcctgagccgtcgctgtccatcgtcctgcgcgcttcgctctaccaagaacttcgcgagttttgtgtcaatgcagacgctcacatcacgctttttccggactacttcagcgacgacgagaagctcatggtgcaggacgtggcgcaggagctgcaactgggctgccagttcggcgaaaagaacatcgcagtgtacaagttgctcggtcactcggtgcaaagccgactgcagcgctcaagtccgcctcctagcggcggacaccctaacaacaacgcggctgaagatgtgtatgttgacgttcaagaactggcccagcacggcaaggacggctttattgcgaagctgcgactgcggcgtctgagctcgggaagtggcattcgacggaatatgctttgggacgtggccgagttgagctccacggccgatggtgtcgctgatcccatgagtgaaggagaaggcggggtgtatgcagttcaatctcgatcaagcggtcagaagctcgcgcttttcaagcctgcagaggaggagaaatttgtgcgtgaaggcttgtttgccggtgaaggggctattcgagaagaggtggcgtatgtgctcgattcgcgcagcaatggcttcagtggagtgccgccgacagcggtggcacgcttgaagttgacgaacgtcggtcgagccaagcaaggagctgtgcagcgcttcatggccagcagcattggcagcatggagagtttcggtatgccattcgaccttgagaaagcgcgcgagtttgtcccagtggagcaggtgcaccgcattgcgctgctcgacgtgcgcgtattcaacacggatcgccacccgggcaacattcttctcatcggcgaaaagaagccgtacaccatggtacccatcgaccacggctgcattcttccaagctggttccacctgtctgaagcgcgtttcgactggctcgagtacccgcagtgccgcgaagccttctcgcctgcggctttgcagtacatcaactcgatggacgccgagcgagacgccaagatattgcgtgcattgggcattcgagaggagtgcgtgaccacgctcaagatctgcacactgttcctgaagctcgcggctggacaaggcaagacgctgttctggatggggagcttcatgacgcgggacgggtgcttccaggagccctcgcgcttggaggttgccatcaagaacgcgtgcgaccgtgccggcattccttacacgttcaaggccaacgagttcgacgagcagcgcggcgagatcgagctgggcgtgcttagccgccgtccgcccaacgagtttttcctcgcgctcgagcacttgctgctcgaggcgatccacagtgacgagtcctaggcttagccagatctaaggcgagcgatatgagcgctggtaggtagttcttcctaatgctacatggcgacaagtaagccagtaacactagtaacacgtaaatcaacaacacgcaaaaagcgttgccatcttcctgcaacaacaaactgcaacttgtcccgtatttaccccccaattcggacatggctacattttgtgcccttgattggctgaagagctcattttcgactgtcatgacggacgcgacgactacgcgcgagcgcactgcctcctcgtcgtcggacgaggccgactggcgagcttgcgtggagtacgagacgaagcgcgtggtcgtgggcgacctggaggtgcaggtgttccagatggaggagctgccggtggccgcgtcgctcttcatgctggccgaaatggacgccaacgagcaggagatctcgggcacgcgcctctggacgggctcgcacttcctctcgcgggtacgaggccctatctattggtattgtgtattgcaatggtgtcctgacttgagatgactttgttgcagtatctgtggcgtcacccggagctcgtgcagagcaagcgtgtgctggagcttggtgccggaactggcatctgcagcatcgtgtcggctaagcttggagcggtcaagtgtctggccacggacggagatgaagaagtggtggagctgttggccaagaacgtgcaggtgaacgaagcggagggtgtggtgactgcccgctcgctcttttggggcgacgaaccgtcggcgcagacgctgctggaagagttcccgggtgcgttgactgatgttgacattgtgctggcgggtgacgtgctctacaagagcgagctgttgccgctgctgtttagtactgtgacccgggtgctgactgcgccggatgatgccgaccgagctttcgtgctgtgccacattcctcgcgcggatgtgacgcacgacctggtggagaagcagatcaccgactcgggcctcaagttcgaggaggttaagctgcctgcggaagatgtggcgaatgcggctgcggagcttgaggagtgtcctgtggaagatgtggagcgcgctaagctgtactatatcaccaagtaatcgtatcagacaaggtggattcgaggtagaacacaagcgaggcttgtcagaatagctgaatagacgacgatgtgcatgttgaatgctgtgtgtatctatgtacagaacttagagatcagaacgggtctatttcgtgagcacaagacagatttgaggaatccacgactgcttaatcctcgtcgctgtcttcgtcgcttgagtctgagtccagcaagctgaatgcgtttacaggcgctgacttgccctttgccggttgtgacgcggaggaatcctcctcctcctcttcatcagaactctcttcctcctcatcgtcagcatcaacgccgccctcttcgtgtgcaccagtctttgatgcctcctcctgcttgcagtatttggcgatactggacggtgtgatatccttgcctgtgtagtcgggcggaaggaagaagaggggcagaatgccatcaaccgtgtcacgaaccagctccgatccagcacgttggtgatcgggtctaccacgacgatccgtgcgatagccgcgcttctccgcgtacgcttcacacaatgtccaaggtgtccactcctgcagatagaccacgaacgaaagcatgagaaaacatgaaaaagcaagctccacaataccaaatgaacgtacgagttcttcctctaaaccgtcaaatagctgtgtgcggggcttgaggtccagaatctgctccagcacaacatgttcggccaggaaacgcactgccgagtatggttcacgaatctgaacacgaagttaagttagagatatgaacaacggataaaccaagaagaatcgacaatgcatatactgtacctgtgagtacgggtacagcccgctgagctcctggagatacttaggcacgccggcaaacgggaacacgagaccaggacaatcgcaaatacagatttcaggagaaatcatgatcgactgcagtcgcttcgtgtgtcctggagtgtgcgagacactcacgatcttcttgcccgccagcgcattcagaacactcgacttgcccacgtttggatgtccaatgaggccaatcgtaaccttaggcgtgttagcctgtcccatggctgcggcgctaccggggacagcagggtctgtggactcggcagccaatgctgattgcaggcgtacctggaaatggcccttaagctcagcgtgttcctcgcgctcgcaccgggcgcacaacaagtaaccccgagcaatagcgtccgcttcgtccttgaccttcgcgtcggcggcgctcggccgtccaccaatcgcacacgacatgcaagcaacggcagcgtcatcacagccgcagtgctggcactcgtgaaccacggcagcaccgtccccagcatcgccatttcggccaccacggctcttctgtttgcgtttgctgcgtcgcttgcctccagccttcttcttctcttgcaccgcgtcaaactgcgcctgcaagctctcttgctccgtcaagctcgcattcaactcttcggcaagcttttgagcctcctctgaatcgataccgcaagccacgaggatgtccactgcacccttgatagcagatgcatctccgacttccaacttcttgctgtaaatggtgaacagtcgagcgacgacgcataaagttttagtctgacatcactacagcaaacttctccaagattttttttacctgaggactcggcggcgagtgctgacatcgttgtcgccgtgcacagcgttcgagcgggatgagaagcagacctgatgagcgagaggaaaccgcgtagccaagtagcgcttccagagctggacgacagaagtcgggatcaagtccaccttgttgagcaccacaaccataggtttcttgagctccttcgtaacgaggtcatacaccgacgcggggatgtgcagcaaggggttccgcacatcagccacgaccacgacgtgcgtggcccgctccgtgactcgccacagctcacgccagacctccagattgtgctcgaagtggttcaagtgctcgttgtcgtacttgtcgtgaatcttggtgagccactggtcgaacataagactctcattggtgtccactgtcatcacacatacgacccggtcagaaacaagtgcacacactcaccaaattctacaatattgctatctccacgcacccttctccttggacatactgtacgtccacttcggtcgcttggggtggtccagaatcgggtcgcgttcgctcaccgtggccagcagcggcgtctctctcttgtacagattcaacggacgttgcccctccatgagtctcaactgaatctgctccttggtctccttcacgaagaagctcgagagctccttgcccaccgcgtccttgttgttcttgcctagcgccaccgtaagcttcagacgggagctgagatcgttgtccaggtcgttattccgagcgaaaaagtccggctcggcgcggaaagcttccacctcgtcatcctcttcctcctcctcaattgccgccggtttatccgcgtagaactcctcgtattgcgcgctctgcaggtccagcgccgcctcctcgtccctgcgcgaagccagtcgctgcttgcgcgcccgcagctgctgcttcttctgcttgccactgaagctggcagtcaccgagttcttggcgcgctccttgcgctgctgcttgagcgtgtccagctcctctcggcggcgcgcgtgcagcgcggcctcgcgcttcgcctgctccagctccacgtccatcagagcctgcgtccagtcaaaaactgaggcggttgacacgcatatagcactaaagcgaggttttatgtcattcattcgaggaaggtagccatatttgggagatgggtacatgcgtcgcttcaagatcgcaatgaccaaagaggcgtgagcagctccagtatcgaattcaaggtgctggtaggaaggaggacggagacaggatgcagctgcgccacttgacgtcgctgctgcaggcgacggagggcatgtgcaaggtcacggccatcgcgttctcgcctaataaccggcgactcgctgtcgttaccgtggaccgtgttgtgcacctgttcgacgcgcagactggggagcgcaaggacaagttctcgaccaagccggcggacaagggcgacaagaactacatcgttcgtgcgcttgagttctcgccggactcgaccaagctcgcggtggcccagagcgacaacatcgtcttcgtctacaagattggtctcgagttcggagacaagaagagcatctgcaacaagttcgctcagcccagctccgtaacggcgctcacgtggccaagcacccacccgaacgaaatcgtcttcggtctggccgatggcaaggtgaagatcgggcaattgcgcagtaacaagccggctacgctgtatgcttctgggtcgtacgtgtcccgagtgtgcagcaaccccgagggaactgcaatcctttcggcacactacgacggcgctatttaccgtttcatcttcgacgatgtcactggaggaccgacgcacgcgaagcttgtggtgcactcctgtgtcccttatgcactttcgtggggagaaagtatcgtagctgcgggcaatgaccgtcgcgtgtcgttctacgacaaggacggagctcagcttcgcacgtttgactactcggcggatgaaaagtgcggtgagttcacctgcagtgtgttcaatccgacgggcgaatctgtggtcgtgggcaactttgactcgttctacacgtttaacttccagcacaaaacggaatcctgggagcttgtgggatcgaagagtattcccaacctctactcggtcactgcgctcgcatggaaacatgacgggagtcgtttagctgtgggctccgtctgtggcgcgttggatctgtatgatgcctgcgttcgtcgctatcgctacaaaggcaaattcgagtttacctacgtatctctaagccaggtgatcgtcaagcgactcgctacgggggctcgcgtcgtggtgcgttccgcgttcggatgtgagatcacgaagcttaacgtgttccaagatcgatttttggtcggtaatacgacaaacacgcttattgtcggagacctcgacacttcgcgcattagcgaggtgcaatggcagtcgactggagccgagaaatacatgctggacaacgagagcgtctgcatcgtgtaccaagcgggtgagctgtccctcatcgagtatggacagaatgagctcttagggtccgtgaggacggagcacctgaacacgcacttgcttagtgtgcggattaacgagcggcctccgctcccaatgccacaagatgggggtgacccgatgccaccccaggagaacaagaaaattgcgtacttgctggatctgcagacgatctgcatcaccgaccttcatgcccgtgctgcctcgacggtcaaccacgactcccgtgtagattggctcgagctaaactcacgtggaaacttgctcctgttccgtgataagcgacgccagcttcacctcttcgatctcgacacccagaagcgtagcacactgcttaactactgcaactacgtgcagtgggtgcctgaatcggacgtggtcgtcgcgcagaatcgtaataacctgtctgtctggtacaatattcgctcgcctgataaagccaccatttaccagatcaagggcgatgtcgagcagattgagcgtggcaatggacgcaccgaagtgatcgtggatgaaggcatgaatactgcgtcataccagcttgatgagtcactcattgcatttggagctgcggtggacgatggacaactcgtcaatgcgatgtccatcctagagcccctagagctcactcctgagaccgaggcgatgtggagtcaattgagtcaggaagcgttggcgcagaatgaccatcgcatcgctgagcgctgcgccgctgctctaggagatgttgcgcgttcacgataccttcgcaagctcaacaagctcgactggcaggagaaggaccgcctcaatgggctcgctcactggaaagtgcgggcaaagcttgctgtacttaagaatgactaccgcagcgcggagcacttgctgctagctcagggccaagtggacgaggccatcgagatgtatcagcacttgcacaagtgggaagatgccattcgagtggctgaagcaaagaaccacgcggagtgtgagcagatgaagaggagctactacgattacctcgtcgagtctcgacaggaagaaaaggctgcagcagtcaaggtcaaggacggcgactacgcgagtgcagtgagtctgtacctgaagggtggtctacctgcaaaggctgcacagttgttaaatcagcgaaaccttggtcgtgaccacaagcaactcctggagaccgtggccgatgcgctgtactcggcgggcatgttcgagaaggctggcgaccagtttgagaagatggagcaggagagccgagcgctggctgcgttcatcaaggctaacgccttccgcaaggctgttgagctttcgcgaaagcacttcccggacaaggttctgcgtcttgaggaagcctggggtgactaccttgtatcccagaagcaaatggacatggctatcaaccactacatcgagggtaacgtacctacgaaggccgttgaggccgcgttaaactcgcggcagtgggctaaggccagccagctcgttgagaatttggaggacgacgtctcactgccgtactatcggcgactcgctcgccactaccaagatgcaggcaatctcgagcaggccgaacgctgcttcatcaaagctgacgctgctcgcgatgctgtcgaaatgtacactcgtgcgaacaaatgggacgcagcgtaccaagtcgcactcaaccacttggacaagtacgagaccgaacggctttacgtggagcaggcgcaccggatggagcgtgctggcaagctcaaggaggcggagaagctcttcctgaccgtgaatgagccggatctagcgatcaacatgtacaagaaccacaagaactacgagcaaatgattcgccttgtgaccaagtatcgcaaggatctactcaaggatacgaacctgtacctggcccagcagcttgagcacgaaggtaactacaaggaggctgagcaccactttgctgaggctggcgagtggcaggccgcagtcaacatgtaccggtccaacgacatgtgggatgaggccatccgtgttgccaagtttcacggcggcatcaatgcttccaagcgcgtggcttacgcttgggcaatggacctgggcggtgaacagggcgctaaactgctaacgcgtcttgggctcattgaaccggcaatcgactatgcgattgagagtggcgccttcgaacatgcctttgaacttgcacgcaattgtgctaccaagaagctgccggaggtgcacctcaagcacgcgctgttcttggaggatgaagaacgattcaaggaggcagaagaggagtttatcaaggcaggtaagcctcgtgaagctctggacatgtacgtgcaccaacaagactggcaaaatgccatgcgcgtcgcagagagtgccgacccagcgtctgtggcggatgtcttcattgcccaagcgcgactctggattgaacgcaaggaacaccaacgtgctgaagggttcttcctcagcgcgggcaaacccgagcttgctcttgctgcgtatttggaagcagcaatgtgggctgatgccgtgcgaattgccaagcgccaccttcctcacaagctcatggaggtgaacatggctcaccagcgcgctatcttttctggtggaccgaagaagaaagaggagcttatggaggcttgcgagatgtgggtggcttctcagcagtatgtgcaggcaattgacgcgtatctgtcgatctccgtggaccagatcagcgaccttggtgagctggaagagctgtgggcgaaggccattgagttgtgtgccaagcacgacccgagccgatacaagtcgatcgtggaggaggtggcgtcacgcctactaggcatgtctcgcttcgattccgcggctgagcatttccagtcgatcgacaagatgaacgaagcgctcgactgctacctgcgcgtgaataactgggtcgcagcgcaaaagctttgcgagcagcatgcacctgagttgctgcctcgacttgagcgagcacagcaagcgagtgccttcgggtctgctgctcaccaaccagcagaggcgaaaatggcaggcagctcgtacactccttcggctgatgccaaggtgcagtatgcctccgagaagaaggagtcgaagctcagtgctggaggtgaaggcgacgactctggacgcggagcaagcgcactagacgcgtggatgcagcgcggtgaatgggacaaagttctgtcttcagccgctaagcacgggcccggatcgctggccaagtacttggtcctgcgctgctcgcgcctgtgtgagcacgacgagatgggcaccgccatcaagaccattgccgactatggcattccgctcgactcggacgccctggacatgacagagcgactggtgcaaaagacactcggatgcggtcacgggatcgaggagaaccctgagcaccaggcagcactgccagaactggtcaagtgcctacgcaagctcgtgaaggatctgcgtggcaacggcaaggagttcccgagctccagagtgcagaagatggagcagtggctactggtggcgcacttcttcgctatcaagcaccaagcagcgaacgtaggactagacgacctggttgcgaagatcagtatgtccctgctgcggttcgtagccgtcctgcccgccgataagatgttttatctggctggggccgccgcgcggaagaagaagtggctcagcgccgccttcgtgtactttaaccgctatctcgatctgtgcgaggccatcgacgacggcgacgccagcaacctggacaacaccgacttcatcggcaccgacatcccgtcgcctctggactttgcgctgcccgagacgcacttcgtcgccgaagagagcgcgcgcgaggagatccgcgactgggtgctgacgatctcgatggaccagcaggtggccgagaagctgcccgagcgcgcgtgcctgaactgcaaagccagcatctacgaggcggcgctgcagtgccccgaatgcaagacggcgtcggaatcgtgcatcatcacgggctttcccgtggccgccaagacgacggtccactgcgccacgtgcaaggtcatcgccgaccgcgagacgtggaacaagtgggtcaagcagttcggcaactgcccgtggtgctcggccccgcagaagatgagctactgagcgtgagtgcggctgtcgatctaaggtgtttgtcaacgatgactcatccacttcaacttcagtttgtttgacccaagcatggtaacgttatgtctgcggagcacaccattgagtactatattcactaggtcgtcttcgacttggctgggaacctgtggtgtaaaacgctggtgctcgcactgatgctcattgccgtgacaggtgcgaactttctgaagctggagctgtgggtggcgatgtgtacaacctgccccagttcactggctccggcgcctcgacttgctgccggaaactgaaagctgtccttgaagttgctgggtcaacaagccagaccgagttacgcgttacggtcacgcaattaatccattgcggctgcccaccccctcattcttggggtgttcccagtattaatgctgccgcccgcgtcaaccgagcgatctcctctcgtaggcgtgcattatcccggcttatcatctcagcagcggcggcttgagcagcaattagtgattccactgatgccttgagggactgcactgacgccctgacggactgcagttcggtctccactgacgccttgagggatcgaagttccatcttcacgtcagctaactcgttcttcatgtcagctaactcggcacgaagtgcgtccacgccaacacatatgtcgaagaactgctgctccacatcaaggccagtcgtgtatttcctccgccgcatatattgtaacacctcgattacagcttcggggtactcgtcagctagcacctgcagcaccctatgatcagctaccgcacttcctctttgaattccagcattgcatcgagtcgaagacatgggctgttaccgtgagcttgttcttttcccaagtatcgtcgtccagtgtaaaactgcagttcatcaaaggcagtaagatctctgccgccctcatgagctcgatcaggtattcctgcagcgataaggctgttcttgtcgccattaatgtacaactcgccaaagacgattgcattggcgatgcgctcgccagcttcctcgggagtttcggcccttattttatcgagctccgcttgcacagcagcccccatagtcttctccaaggacccgttccctgcctccttctcttcctcgggttgcttcatctcatcgtcaacaccaatggcgttgtgaacatcgctgaacacctcgtcggaggtctggacccggtactgtgctctggcgctgaaggcgtccatgccggtgtcggcgttgctgtcgacgacgtcaggctgcttgtctagcggaggctcgccgccggcaggtcgctcgtccggcggggacgcggcgccgccaggttgctcattcaccagagactcgacactcacgcacatggggcccctattgcggggcccgggctcattggtgtcatcttgttgcttgttgtccatcggctcccgcgccagcgaaatcgattgtgagctcgctacctgaaccctctcacactaatgcgtgcgtctaaccagccacccaggtaacccgcttgtccttccttgctggagtatcgcgacgatatagctgaacccccccaaggatctgcgcaccaacggcaaggagctccatggtgcagaagatggagcagtagctgctggtggcgcacttcttcgccatcaagcatggacgacgacctggctgcgaagatcagcagtccctgctgcgccgcggaagtgtcaaacaaaatgtttgtcaatgatgactcatctacttcaacttcaatttgctcggtattttgtactacccaatgtagaacgactctacatgtaccgctcttcccgccggaacgtcaacccgctactgaagcgtttgtgcgtatggttcggcgtaggatatagcgtaaatgtcagtttcgcttcgctcaatttggcttaaactcaatgagtaaggaaactaacgccctacctgacaagtagggctgcctgttggatcgagtgatccatgggtttctaatatttgacggaggtggaatggccgtcattttaggaacccgctacttttagggtgactaaaaagggggccggtccccgccctatattaacttgccgagtggctactcagagtatctaaggccgtgttcgacgcggcaagataatgacactttagagcgtgttcgctaagtagctggagatatagatggcctctcatcaactctatttcttgtcttttgattggtcaaaatagtttagttcacaacgtgacaactggagaattaccccgtctccttctccagctcccagaggtggagaaggagaaagtagctggagattgaggcagtttagccgcacagacaatggacgaagaggaagctgtactggttgagaatccgacgatgcgccgcgaggccctaaggaacagattcgtaccgtgacctcactgcactttgagcccatgctacagtcagccgcgtatgcaagttggtttgaagacaatcttcgctgcaccaagccgactttcctacggattgctagtttactacgagatcaaggtgttctgtttgctgctgccaaagtacggcagcatagctttgagaagaaagttgcagccgcgctttactttttaggctcaactggtgggtaccgagaggtcggtggtgctatgggtatgtcacggagctacgtaatggagattacgaccgaggtggtgcgcgtcttacgagcaatggcggcggctgtcatttcgtttccacgcaggagagaggactgggatgcgatcgagtcaggtttcgctgcgcgtcatggctatcctggtgtggtggtcgccactggctgacggaaacggaggcgcagctctcggagcgtcatcggcagcttggtcttgccacgagtccggtgtctcgggcagtgttcccggccgacgaagaaacagcaaagtaaggagaaggagagcgagtcgttgcagttgcactgtgattggctaattttacctagatgcgctctgttgtagcgaacaagctggagatggagatgcaccaactccctgcagatatccatctccagctgcgtagcgaacacgctcttaggtctaaaattgcatttcgagtcattagcacggcaacgaacacgggccggagggtgaatttgccgcgcgatttcgtcggtgccttcagcatgtcactaaagtggagctttgaacccatatttgaccagtaaaacgagttgtttcccctctcattagtgacataggatctttagtgcttcttcgcttcatttccgcattccgcgacaagcagcgaagacgacaagaagaacgcctcataccatggccaacgccgacgctgtccgtagtgctgacgctaccaatgccgccgctggcgctgatgccggcaactctagggacgttccaagtggtggaggaactgtgagagcatcctggaacgagatggaagagtttgacctgctggacaagtacctggacgcaagaaacaaccgatcccttgcgaccgacaaaggcatcaaggctaaggcatggaacgtcttggtgctagctctcaatgctaagcaccaacgaactctcgacaaaggtgactgaaacgagcgtgtacatcttttggttggacaactaagtcagagaaagcagtctggttgaacactacagtctaccgaagcatcgttcattacggggaaacaaggttttcgctgctcagtccttgaacttgcagcaccgaggatactgtacctgtgctcgcgctgagggcgtagtgccataaaccccagtggggttaccccacaacttatgtgctggctaacgaggctgcaggtgaagaggccttcgtcgtccaccgctccccaccatgtagtacaaaatagtaggatcgacgatgagattgcgatctttgctagaaacccaactgcgtggaggtttccgctccacactcgacgcaagcgtgtgtaagtagcattttatctgcccgtttccaagctcgcatagcgtttcaacggcagccctcgacacaccctccacgtatactcaatggagcctcgtttcagcgggcctggacacaggataaaggcgacgcaatgatcaatgatcgacgatcacggcgaagctccgagcttgagcttgaagctcgcagctcgacgccaaaccagattttcgaccaatgggattcatacagtgacgcacgcacaacatggcagcagcatcgacggcggcgacaaaggtgccgacgctcagcactgcccgtaggcggccgtaggcgtgcctggacgctcactcctgttgttgcgtgtatgagcagcccaagtggaagaagatcctctacgcgccgcagccatatgaggacaactacgtggccgacacgttcctggagcagatgcggacgaacggtgagcctcgcagtcacccgccacgaacagcaccaactagacctggatctgcacttcgctcacatctatggtgttcatggtgtttcttctgttgccgcagcaaatgtgcgggagcacgattacgggggcatggtgcgctcggccgcagccatcacgcagcagatttgcgccgtcttgatcttcttcgtagggtttagctcgttggcatcgacgggctacttgacggttataattgatactgttgttctctgctgcacttggcaagtctgtgtttgagttcgtgcgccaagacgccatctccgccgcgctgctgggcggcatcgacgtgttcctggcggtgactggctttgcggtgcttcgcattcacctcggcctgcctctgcgtgagaatagtcactgctgtcgatatctacctacgctgcgttttgctaacttggtgtgtatgaactgcagacacgctggacacgctgagctcctgccttttgttctgcgcgacgctgtcgctgctgtcgcccgtgctgcggacgctcacgcggtcgtacgcggacgacacgatctgggcgctggcgacgttcctgggtctgctgcacctcatcacgcacgactacaactacgtcaactcgggcatcggccggtacaccgggcggcgctgctatgcgttgagtgggagccactaggccacgactgacgtgtttcgctgcgtttatggcgtgtttgagcaggttcagcggcacgatctcgctgaacgcggccatcttcacggcggtgctgctcggctcgcggttgcagtcgaacgagcacgtgtttgcgttcgtgttgctggccatcgagatcttcgccatgttccccatcttccagcgcgaggttaaggtgcgtagtacatggctaagtaatactgtcgctgctgtgttgccggtgttggatgcagtagcgtggtggtggtctcactctgcggctttcgtctacatgaacgaacgcataccggtacgcagcggcactcggagcggctgcacctcatgacggcggtcgcgctcttcgcgctctcgtcggcgctgacctggcagctctcggcgctgctgagcgcgctggcgggcgccttcgtgctcttcctggcgttcgtgtgcccgctctggttcatgcacgtgcaggagtccaagaagtacgtgtcttttttttcccgtcggtgatgcgcatccccctctgacgtacgacctctattttcgggttctttttgtgccgcttagcgagattctcggtccctgggacattgcccacatccagcccgagcagtgagcgcggcagcaggaagaggcgggaagccatggccatgccacgcagaacaagcagcggcggcggcgctgcgtggcatgacgagcccaaggcaggctgctgagctctgatggcggccaacggacacgcgcggcggcggagttcaagccgacagtggcacgtcgtttcgttcgccgaattttctttcgaacgctcacatgtaacgaaaagtatcttttccagcacaagtgtcccctcaagcgcaatggcggccgtccgtggcggcgggctcagctgcatgatgcactgcatcgtccgccctcgtcggcaaagccccgtgcgtgacgcagcgcgcgcggttccccctgcagtcgctgaggcctcgcattgcaatggcggctctcggtgtcatggtcgctcttgaaggcggcaccagcagactccccgcaccggcacgaggaggagaccttaacagctgagctcgagctcactttgctatgatggacttgcccgaggtgggttcgagcgcgtccccctgcaagcaacggggaccactcgtttgccctgcttcgaacgcatggcgacccttcagcagcacccctgcaacaaaaacgacctcccgctgaggaggaccgcaatggcgccacgttgaagtgcgtcagctcggacgcagtcccccattgcgcgctgcttgcaacgtgtgtatcgcctccagcttccgccagtacaccagtcgaatgctagtctccacgctactgtgccacatttccccccagcgccattgccagcggccttattgcccgcgaacggtgcacgcagagtgcctggacgatgccagccagccgggggcgccggcggagatgcgctccctgaaaagatacgcggccgttgaagtgggcggcgatttctgccaatcagcgcgcgccgcggctgattcgcagcaacgttactcaccgaggtttttcgggcgctggcgcgaggtttttgcaggagcggaactttctgcgaacccgtgtcccggcgctgcgcgaagcagagccgcggcgaatcacttcaacgcccaaatccggcgccgccaactcgacccacgcggggcccagctggcgcgggctatccaggctgcgcttgcaagtggctgctgtcggcggcaacgtcgcccgccaaccagcccgcgggtctgccttatcgccggagggtggccgctgccggtcaccgggtaacggcgtcgtctatgctggcacgggtaactgtggccgaattgccggcaatacagcgcttgtctatgggcgatgggccggcgggccccgcgaacgtgggacttgccttctgtatgccggcttcggcccgcgggtcgcggccgaaacccagaagaacgctccgtcgcaggcgattggccgaaagcttcaagcgcgccgcgattggcccgctgccgagcctagagggcggcagtgtgagtcggccataaaaaagaaagattgcccacgactgctcatttgagcttaagcctgcaggagtgcaagtgcgcgctccaccccccccatacccaccactactccgccgcccagccccgccgctgcttgccgctcgctctccccctcgtcggcgatcgttgccgctgtttgccgtcttgtcgtccgtgtatcttttgtgtgtgctcgcgcgctgctaccatcactctcccgagcgcgcgtcgtcagccttctagaacaaaagaaaaaggctctccttccccccctcctcttcaaccgtcgtcacaatggcctccgccgccgtgctcaagagcgcacgatcgcaccccaagcttctgtcgctccagcacgtggacgacgccttcctctgcggcggcgacgcgcccatgaccccgctgggcaacgacgcgccgctcttcgccgccaccgtgtccccgcgcgaccccgccgccaagctggccgccgcctcggcctcgcccagcagtagtaagtcgcaccagcaaggccccgccttcgccagccaccgcgtgtgcatcccctcgtccgcctccagcgacgacgcctcggatgacgaagacgatgagaccgaggacgtctcgcgcgccgccggctccagcagcaagcccgtcaagggcaacaccggccgctggaccgaggccgagcacaagctcttcctgcagggcctcgagaccttcccctaccgcgcctggaagaagatcgcgaccctcatcaagacgcgcactgtcgtgcagatccgcacccacgcccagaagtactaccagaagctggagaaggaggaggcgcgcctcaaggagcgcgaagcgcaggaccgcgcggtcatcgcggccggcgcagcgcccccctcgccctccacccccaccagccccgcctcgcagaagaagaagatgcacctcatgcgcaagcgcaagtgctcgatgctcgacatggacacggagaccgacagcgatgccgctgtgctgcccagcgtccccaagcgtctcgcgcgcgagcagcccctggctgcgcacatgtcccccaagcagaaggtgtcttcgctctcgggcaataaggtcttcttcggcaaccccatggacgcgcgcttcatgttcggtcggaacatcaagagccacgccgtcatgcaacccccgcaccagctgccgctcgactttgctgacgcggccgccgaagccatgattctcgacttcgccgaggacaagaccctggccgactactcgctcgactgcgcggaccagacgctgtcgtctatcgacaacgacgacctgctgcagctcacggaggaggaactcgagtggttctcgagcacggagcagcctgccgccacgaccgagaccaaggttgaggctgctgccagcccggactccgagcccttctcggagctggacaccgctgccctgggcggcgacaactttgccgcggagctgtgcctcgacgacgacgactttgtgctggacccggagaaattcctgtcgagctacttcgccccgaacgagcaggcatgaaatgggaagggcgacgtcgtggtggtcacaagtgctgcagcttcctcgtagagcgccgtcccatttgtccgtccgtccgtagttttttttttgagatcccccccacccagctttcctgttgcgtcgggcgctaggctgcagtcgatttagttgcacgtagccgacgccctccatggagaagtgtctaccatattattattaacgttatatcagcgtcaaaacaatttttccaccctcgctcaagtcgaagcttcgcttgctcgtgttgaagttagttgggtaccgctgggttgctgctgctgatctcgaagagcagcacgctctgatcgtggtggaccacggccagcttgaccggaatttggacgcacgccagcagcgcactgcaacccgagtccgcaccggtcgaagcttcgtcgcagccgcgcgcgttgctgctcgcgatggcctggcgaaggctgcgcggacctggcgccgggtctccgaagcggcacaccaccgcgcggaagaccagcaccagcttcttcctctgcttctgcttcttggtcttcgtagccgtaacagccgaagtctcagcaccagtggcttgctctccattcgtatcctggtcaatggacggaggggactctacatcgactgccaccgtcttccagacatcgaacgcgacgtcgcatggctcgcccgccacgaaatgtcgaggcacactgcgaccgtcctcgctgcttgaagctgcttcagcagcagcaattggctcgagacaccgacgcgggtgcagcttctggtccttgaggaatgcgtagacctgcatggaggcgagcgacacgcgcgggtccctcgccagcagagcggtaaactcggccacgctcagctccctggcgtcttcatcccccggtgacagcaggtagatgatggctagcgcccctcgctgcagcaggtagttggcctcctccgggtagagcgacagccccgtgaaggcgcctgtcgacgtcggaggagggggcgccgccttggccgcgactgctggcggctgtggggcctctcgccgctgccgctttttcgtgctcgcgcccatgttgaacagcaaacgcccgcgctggtgcgtgatgtgcgtgagccccgagacggggtcgaactcgcccaccgagacatctttgcccccggggcggaccatttcgtgctcgatatgaatggagttgattgcaatagtttaatcaaggtagagtgtatcatcgtaagattgtgccatttggtagaacagcttcaacatgtttgtttttgacaaacgatctaaactaaatactgctcgagtccttggacttgggcgcaggcggctccactgctacgatccgctgtcgcagctccttggagttcaccggcagccactcgtcgttgtctgctgactcgccctgtgaaaaaaacccggtagaatatggttgagatcgctgttctacatttgtaggattggagccagctgaagctgcttaccttgtaatgaacgcgaatgtacttgccctccacggccgcaaccttcgcctgcacagcaacatcacaaacagttcattgcgtcagtaaccctcgcatatttccacccactagcaatcgtccttggtgacgaacgaacctcggtgtccacgaaccggatcgtcgagcctttgactgtaagatacttgcgaactgcacctcggtccttcgttgcgcttttgggcgtgccgacgcccgattgattagtggccttcgcttttttcggtggtgacagcatgacggcggagactggtaccttcgccgacttcttcttggaacaaactgctgcttccttcttccgcttgcctagacagctgcgcactccgctctttgatgctgttccgctcctttttccaagtccaccgcttgataaactgcgaggtttgacaccggcggcttcagcgatgcatcggtggcaaagcaacgactgagggagatcttcggctgctttgccggcgaggtcggggtgaatgcagcgaacgtgggcccaaatcttgcactttgagcactcaaaccattgctcctgcagaacacaccggcgtttgctcgttattacaaggcgctctacactctgccacacatgtaaatgtacctccacttcggcatcggggttctgactgctacagtacttgtggcacttgcagctgaagacccagggatcttcgcccaagagctcagggctgcactgaggttcttcaaatagcttcgtcatgaacgagtccatgtcaatccgcacgctatcaggaaggcacttgcagacctatcgttgacatcaaccaccaaacattttaacgaatgtgtaaaatgactttgctacagtaggtccaggtaaactcttgcttaccttggctttcagtccatacgggatccatagcagcgaggcaaaattgactgcctctgcaatattgaagccttgaccacacacacacagtaggtaaggtgttgccatcagtatgtaacccttcatatccaccaaacgttaccgaggttgaatccctggtgatatgtcgccggaaaggtaatcacgaactctcctggcttttgatacgcccgatagaacggtacaccaaactctcgaaggcgagcgggtgaaatgagggatgtcttgtgccgcaggaactgatcaaatttgtaaagttcaagatacgctattggaaccgtaattctttcggcaaacaagcgaggtccctttacctggctgcatgtgtggtgtttttctgggaacatcgactgcgctgctctttcaagctgaggggctgcatgggcgcatcaaggtagcgcttgttagtgaacaataccatttcgatgccacacgattctttcggttatgcagggactcaccagcatctgggggcacgccataccaaaacttgggttttcctgtgtgcacgtagttgatgctgtagagatccatgtcttcctactcacacgtcaacgacaggcagcgatatcatgagacaacgaaaccgcacgttctctcgattgtagtgcacttaccgtgtggaacgcgaacatcgcccgccacatgccgaaatacagcatagactgcgtcacccctggcaagtcgattttgcgcagaatagtgttgaggtcatttaggttccacgacagtgcatcagcatcaccaaacagcgaagcctaagtccaaccgaacagtgcagagcttagtatgattgaaatcatttcaaccaagcaagaagcatttcagtacgcaccacaatatccgctccatataccggagggtccatggttcctctcagccccttccagaaccggcgctccacttccatcggatcatccgtatctgcatccacacacacattatttaatagtatcctcgatggcactaaacacagcctcactgtttcgtaccctcgggttccttgtccgtggtcgcttctgccatgctctggaactctgcggggctcatcgtcttccgctccacgaggtctacattgaaaatacccttcctgccggccacgtgctgactcacgggggctgatacctggcactgtagctgcgagatgtcgtacgagcgactgaaccatccgcgcggaggaattatctgcaggaaatgacacacagcacgacaaaaatccgttatcagatgataaatgcaccggaaagtaattggcgatgactgatcaccattccaccaactttttagcaattgaattcgttggattttaccttgcaaataccgattttggcgcactgaggctcgacgactgtgcggatgtacgtggcgaacgactcgaactcggcgcgcgtaggatggaactccgggcaccaggagccgtcgggcgatggataggaggccatggaagcgccgtgagggtcgctagggcgcatggcgaatcgagggagctccatggagcgggacgaaggtgtggacgaagcgtcgctgttatcgtcttgcgtgtcgtcttgcacttccagaggaacgaatggtatttaacagcataactgataggtagccattgtatatgttacaaaattcagtatgttctattttagacctcttagctcttctaaataatttaaatttctaagctgaaacattcaggacggatcattctaatttagaatggtccaatcttgaaaattagaatgtctaaatcatctgttgtcaacggcccatatttttgatcacccatggcccccttagattttgagccctgttcggaccgatttcactcctcgagttctcaatatattgaagcgatccatagcctccccttcaaagaagcacacgacaggtgatgtttgcggttaaattgcgattcgctcggtagagtcggaagtttttagtggttccagaatggggggggggggggtaagttgcctgttttaagtgacaacttgtgcttggaaaagtatcttgctctatccgccgtacaatgttttttttttcttgcaatgctgtactgcggacgacgccgcaatatcaattctcaattgcagaccccccccccccctaaacgctctagctccgtccttggatggtaacttcgaaatttcgtgttcaagtatggcatgcaagtgtggcatggcagcgatctccaatgcgaaagagcgaagcatgagttcaagctgaagcttttcaaccctcaccactaaaggccgcgcttgaattctgctacgtattatccccacagaatatgcattgtcagggtagtctttactaagccttttcgctaagggtccatgccgcttggtgaatgaaatttggatctgtaccattctgatttgtaacgtagcaaaatcaccgaaatggctacacgatgttatgccaaacttcaacttcagcatttcaatcgtctttggagaccactgctgtatctacagctcctcgtcgacgccgagtgcgactgacatcttggttatagttgtgctcagcgaaatccccggccagcgctaataaattgatctggctgccgaggcgcgcgagcgggacgtggcgctcctggtagaccccttctgtccgcaaaatgaccgagaactgctcgagaatgttgttctccaccactgtgactgaagacggagcgggatgcaggcgacgagacgtccgacgaattgtgcctgagttctgccgcagcatattgcgcacgctgcgccgacgcgagtgaatcggcaccgactcgtccagcggacaggagatctgaaggcggatggatcgtagcagcttctgcttctcatcgaccacgacctgcacgtgcgttgtcgagtccttggtcgggaagccaggctcctcccaccggtagctctgcatctccggtcgaccactcgcctcgtactcgaacgcaccgaaccgaacattcctcttcttgagcatccgacgtaattgcgtgaggttgatgcgcttgtctgtgtgagctcgaatcactagcgtcgcgccattctcaaatacgcggtggtcaagccacgcctgcagcgcaatccaaacaatggcgaaccaaacgaggttgatcaccagaaaggcgagcggcgcatcaatgatcggcttcttgatccagtctataaaccacgtcggattcggtacgttgaacgtaccgccgcttagtcgatcgatcacttcaaaagagagattaccggcgaagatcatgcggatgatttccagattgcgttcaagttcatcgcgaacacgaagcgactctgtcagccgccggatgttgatgtcgaatccttgagagacgtacgtcagctggagtctcgaaatgccctcaaacttggtgatcagcgtatcaagttgagttcgaaggcgctcaatgagcttgatggaatctttgcatcgcacgatcacgctgttcttgcgctccagtagttgcaagcacttgtaaatcttcgagccggcgatatcgacgggtacaggaggcaactcgagagcctccacggactccagaaggtactgcaggcactcaataagcaggatcatgtgccgtgcagcatcactcagagacttcttcacagttttcagcgtgtgctcaccaagcttgcggtagttgcgaatggacttgcgaaggcttgtcagcatgtcgttcagcacgaaggtgcgcacaaaaaaattccggatgaagatttcgcggctgttaagtcccatgaacgtggtcagcaacgattcgtagcgctctgctcctggaccactgagaagacatccgtcacgtccgaggaatagcacgtcatcccgcgtaatgtcgtagcaggcgtagatttcgcccaggacctgcttcagctcattctcgcgctcacccttgtctaagtacttgcaggctggcaacttgggttcgatccccgcagccgtaatgagattatacttgttccgctgatccgctttgcccatgaagagcatgtccagcacactgagctggtagcgcgaaagcaagtccttgatgatacccgaactgtcttggtgaacgtcaactagaagtcgtgccagcaagtccagcgggatcgaacgctctgtgtggttcataatggcatcaatcttgacgccgtacagcaccgccccactcacgtgcaagtgcattccgaagttctcgacttggataacgccgtcactctccggaaagttgatctcagcctcaaagttgataaagcgaatggcgtcgaagtccagaatcttgacctgcgtgagccccggggtcacttcgaagtgcgtctccgtgggctggagatcgagtttagagctgaagaggcctccttggcaccgctccatggctccaagacgctcattgagagccgatatctggttggcaccaaacggcagccactcgccaacaagcgcgtggacctgtgagagtacgatgctctgctttgcctctttagtcatcatgttgtagccgcgcgcagactcagtcgctcgcagcttgttacttgtaggatcaacgaggtaactggtgctggagcgaaggcacgacggaatgtaaggcgacgatacgtatgacacgtcctcacactcagtgacggtgctcactcgagtgtaagactggtccctcgtcacgagatggaaatccgagccgtcgtagcgtacgtagagcaattgtggcggctttgggatgtcttcggctcctgcatcggtccgggatgttcgaacaggagcgtaaaggaactcgttggtctcccgctttagctgctccggcatctgctccacgatcgataatccacgaaacgaggcttggtacgcagtaaccggctggtagtcgaccgacgaaagtttgattccattcacgagcttggcttcccagagatcatcgatcacggacttggcctcttgagagatccgcagccaccggcggtcggtgtgtttcttgtacgtgagccacatgagactaggcgagtagtcgaaaggcaggattccagcattgatgccctcatagagcagcacaagcagagccacttggcggatccacgtctccttcgattgaacattgcgagcctgttgcgcgtacctgctgatggcgtacagcacgcggcagtgctcagtcggccaactctccggtgggccgtaccagacggcatctcccccgccactgttcatcgtcatgccccgaagtcgagtacactgagcgcacaaacagtcgccaccctgctctcaagagacgtctacagccaaaaactacaaacggtcggtgtgtacaccagtgtattttcatgcaaaattcctcacctcgatccatatcctgctggcgcccgacgatctgtccaagccagcatactaactttcctcgctacccggctgctctcttcacctccacgaaatccacgtttcttctcttccccttctatagctaacgaccgatcatgcgacgatctgcacctcaaatgtgctgggtggacaagcttgcaccgaagacccagacaaacagacttgcacttggtgtttgctcatctcttgagatgccttggcaacgcatttgagtgcagtacgtgccttcaagaatgacacgcctactcgccctttatgcacgttacgatcctatcaacaaccatcacgttagataacaatgccatcaattcgacaccatcacttcaaagcaacgcaatctcaccagtcgaagccttcgaaaagaccggatccttgtgttgcggtggtctccttaatagaccactgccggttgcggatatctgagagccccattgcctccgaaatctacggcgacagatcgaacaccatcagcaaatgccatcaattacgtcccagaaaatagcacataacgcacctgagcagcgttcagtgcccccttctggtcctgcttattggcgaacacgagcaggatcgagtccttcaactcttcctcctgtcaattgcaccaccagagacttgagtcaagagcaatccagagtcctctcaaaactcaacctccacccacctcgagcatggcgtgcagctcctgctttgcaatattgagacggtcgacgtcggccgagtccacgacgtagatgatggcgtccgtgttggggtagtagcatcgccagtagggccggatgctcgtctggccgcccaggtcccagacctggaacttgatgttcttgtactgcagcgtctccatgttgaagccgatcgtgggcaccgtctgctcaatctcgtcggcctgcaggcggtctgcacacgccccgttaattattagcaatggtagagcaattcctcgggttgtagcgctcccctcctctcgtacgtacagagaattgtggtcttgccggcgttgtcgagccccaggatgaggatgcgcacctctttgctgccgaacagcgccgcgaataccttggacatggcgatccccatggctgcctcggctcgattgacgtacgcgcgcgccctcctcctcttcgctgtccttctcggtagtgtggccgattgtgggagagttttagaacttaactgggtaagtacatgtagccaaggccgcatcaatcagtaaattacaatgaagccatgagagcccgattggcttctctgattggctgttttctatcttaatttagtcatctaatagtgttaaagcagtatattcgggcagtctaaagaattagtaccagtactcgaactttactgtgctaagtacgctttttgtgtagcatgggcgcgactgacgtggcagggaggtcaagtcgaagttgaaaaaacaggcgactgcaacgtaacgttcagaagatatttacccatgtgtttgcactgcctaaggcattagttgctgtctcctgcgaggcgctgcttcttgtgcggaggctcctcattgaataacactgctcgcaatgcgtaaaagtcgctggcggcagatgaggcgtcggatcgttgcagcagcttcttcaaggccgaggtgatagtttggtccttgagcacagcgagctctccagtcttgggggtgcgacggctttgcagctcttgcaggcggtccaactttcgtaccagctcggacagcgtcttgtccttggagaggtcgctgtcgcccgcgctttccagagagctgcggacgtggcctgtgaccacgtccgggaacttgttcatccagcacgctaatactgcaaacgggaagtcgtcgtacgtgtcggggagcttgaacacgctccgtagcacggtcatgtcggggctgaagtggattagacacttgagcagccctgtcatcgtctctgggctctccttcgggttgacacaggcgagcaccttgcgtgccgctgccatcatatccttctcggctacagcagatcgccctgactgaagctccgccaccaccagatcccacataccgtattgctcccacgatgtccactgcagcgacgaaagcacgatgtttgctagacggttcttgaaaatggcaaactcacgcataacgacacgagtgcacagggcgttgagcatagcgggagtgaccagtccaagaagcagctggacaagcgcttcgctgcgacccaggagcttggacaggaacgggtgctccatgtttgcaaacaagtaagggcatacaaaaagtgtcgtagcactcacggcatccatttcgtccttcgacacacttgcaggcaccgtcttccccaatagagcgcatgcttgaactcgagcatcatcgatctgctggctcaggttcaagtccttcattatgttttgcgccaaattgccaccaattgactcgacgaatgcagaatatggcttcagagcagcatcggggctcttcgtaccacttctcgaacagcaaaaggcaaggaggcggtaggaaatcgtgacatctcgtgcgtacatcgccttcaaaaatggaacgaagagttccggggattcgctgagaacttggtccagcattgaatcaaacacgccagcagacgtagccttgggggagtcactcagagcaattcgagacgacacgattatcctttccagcgaggaatgcaggaacgagcccagtggagcggcgatttcgacggcattatcctgccgaatccaagaaattaaaatgtcgttcaagcactccaaaaaactttcagttgggcgtgaacatgggtcaggcatcgtttgttggaagtgcttgatgtcgtcacctcccagagcaatcaaggtttccgggatgtcaaccagcggctgcttcgagatggcgggtgttggtgtagcagcaggcgtgtcgtttggcgcaggcatctctgctgtaccatgtaccggttgctgattgtcaggcaaaaatgataacgcgccgagagagttcgtgtcggacggcgccccgacaccactcatgctggagtcggaatgtgtaggactttgcgagcgtagcggcgacgtgaccgggcttcctgctccaattgggctgctgcgcaccggcgactgtcgaaccggcgaccgaacaggagactgatggacgggcgattgcctgattggagactgtctggcaggcgatgagcttggacccggagacctggcagggctgccgccagaacttgaaagaggacttgggtgggacgcttgcgcttgagccttgttggcgttctctgcagaggggaaatgctccggaaagattcggtgaagctctgattgcaattctggggcactcgactgcagcatggggaacgtctgaagtggaaggattgacggcacaacaccgagcttcaaaatcatcgcgaacgctgtcgacacgcccttctgcatcagcttccggttaatagctgatgctgcaaacttttcaacagcaaagacaaggaattgaatcatggcgagcgtcaccatcggatgactcttcagtgatttcacctggcaaaccataacaccacgcaacttcagtcaatatcgccatccatcatccggaatatgcacaccttccattacgcaccatcaacaaaatcgccggttccactgccataatgttgtccgatggcttgaagtacaaatagtcgaagaacatggcaagctgtactcgggccaacacgcttggcgtcttactgccgtggctgttcaaataaaatgcccggacatatgtcagctaacatgataccgagaggacataaagggaaagactgacgtaccagagaaggtagagccacccaagaatgtggtagcgtggtgtcaccttggagctcagaacttgatttgaaggatgatacacggcacagatgtagcgcacaaggtcggggactagagcatccgatccaggactgctcaaaaattgagacgaaaaccacttttggtagcgcgtcacggatccagcttgaacgcgttcctatacagaaaaacgggtagtccagcaaattagcgatcataaaatctacttgccatccgcaatgatgattgattgcacgtaccatcataaagagaagatactcctccattttggggttcaaacgataggcgagatatcttggaggggtcggaatagccatcaattgtgcaacagagtacaccgtaacgtccttgtccggttctgcagtatcacgaacgttccgcaattgcttccagagtgcgttcattccggggatctgcattccagcatgaccaaactcactcattaatacgatgcaaaggggaaaaatacacaaaatacaggggggtacttacatccttggcatcactgagcacgcgcacaatttcccgtccaagctgagccacatccgcctgccgacggttccacagcgtagtgcacagctccacctcctgcttcaacaagtttgcatgttgcgaggctgtatgatccaacgagattctcgcgaacgtatggaacacgaaagggatcaaactcgagcacgacagcagccaagcctcgtgctcgatcaatatccggatgatcgacgacgccagccagaccgtcgtccgactcggatctcctccggtcaggtacctcatcaagcagacaatcaccttgtccacccccggcgcattgagatgcaccagctccctcacaagccacagtaactgactgcggcacccgaccagcagcttgacgaacttgagatcgatgagcttctgcagccagcccatgcagttcttgtagctgtccgtggcggccacagccgtcagataccggaggtactgcttggccagcgtgggctccgtcaccacggcgtagagcagcgcgatgtccggctggaacggcagcggcgcgacgccctcggccggctgctgcttgagcacggcgagcgcggcggcctcgtccttgccctggatggtcttctgcatgtggtagaagtgcgcgtaccacttgcggtccagctcgtcgggggcgtccagcggcaggtggttcagcagcttggagtgcggtgtcggcgccgcattgttgctgctactgctactgctgctggtattgctgggcgggggcgtggaggacggcgacgccgcgtgcgacttggacgaactgggtggcgtgctggtcgccgagggagcgggaggaggccccgggggcggcggtgggggcggagccgccgaggaaggggaggaggaaggcggcggcggaggaggcgggtccatctcgaaacttggtgatgcctgtgcgcatgaagtaacattgatgtgtggtacatacacatacatgtggtacacacaaatggtagactgataatcttacacaaaagaaaagcttctggcagaaccgcaaaagctcgcgacgtagagggaggaagtgtacccaccgccctcttccttatctctgcgctgcgctgcaggacaggagagagtcgtcgtcaaacgctccgaccgcctccctctcctggcgcggggactgaatacgaaacgccccccccccaaaagcagaaacaaagaaaggaaggaaggcaaaaggaaagaagctctatcgctctctttggctcgctcgctgtttggatccatgccgcccagacgcttcgtggagacggaggagaccttccacttcttcaacgaggacgtggtactgggcaccaacgagatccgcaccgacgacgcgagcagcagcagcagcgacagcgacagcagcgagaccagtcgcctgcgccgcgccagacgtcgacgccgagccagcagcgtcgtctccaggcgcacgtcgcgcagactaagccagctgctcaatggcagcatcgcctcggagctcgagagtctccaggaagacggcctcagcgacagcgacgaagattatgactcactggacgacttcgagcttgaagaagaggaggaggagaaggtcaaggctcgagagaggaaggattccaccacggagggagatgcagaggctcagaatgcatccgctgcagctacggcgggaacgaaagtgcccggtgttggacctgctacgtttgagcagattttcgagccgttccgggatctgtacgcgccgccaccgaggcccgtaggagatggagaagaagctgattggacgcagacgtcgaagctgtccacaaggcaacaaaggcagtatcgtaaggcgagacgcgccattgcagcattcacacgtcgcatacactgcgcgaatgcgtaccggtaccgcaagcaaagtgagtttatgcgggtgtgctacttgcgggcactggagaacggaccggggtatgaattgctggcaacggctaaagtggacatttctgcagctgatggtgctggcgacggaccaggtggtaaagttaagatctccacgaagcaatcacttctttttgcgtctcagaaggagggcgcggtggagacgactgtaccgaagttattcccgaggaagtggccgcacctgccttacagaagtccacttcaatggcatcacgacactgatgccgctatcgagtttttgactcgccttgccgagctgcctgaaacaagtttagtatatgagcccatcgacgtcaacacgtttgctgctgaggtcacagagttgctggaactctcagaaaatgagcagagatcggagacggcgtcagaaatatcggagtctgcctttgctgggctgcttgggttgcttgggatgggcatccagttacaatcatttacgcttttgagcagagcggcgttgctctttgtccagatggggcaaactacctacatcggcgacaagttttcagatgaagaaacatcgattcgtcctgagatgcgctcgcttttggatttgtattgctcgcggttggcaaagcacattgcagagcctactcttgcggctacgtatcctcgagatttagccgcccagtggaaggtttgctcctaccaaccttctacaagcgatgctattgcgacagatgggttgtacttgtatatctacgggcggtcgggacttttcaagattggtaccggaaatggaacaactgtgcgcgatttcgtgtacgcgcacaacaaggagtatgtccgcagccgcgatgcggagcgatcgtggctatgttgcattggtgattcgctctactgccgcacaattgttatgcctggccaccgggtggatcgcatccgaactactgacctgcaaaatgtgcaggaactcgttttggctccaaaccgttctctgatcggaaaaggtacaaccgaaagtagcgtctatgccatggttacggatggtgttgacctcttcacaattcgctgcatcgatacctacaaaaagccttcgtcaagcaaatcaagtggcagtcgcaagcatcgaagccgcacgcacaagtcgagaaagtcaactccagtgagtgaaattgtgagcgccgtactcggaaaaagcgataacgatccgataaccccacctccatcgcctgacgtcgccaccattcaagtgggagatcgcgtcgttcgtgggcctgactggaagtggtctaatcaagatggcgaaaagggtagtcccggcacggtcgagcgtattagcacgtggggaggtgtaaaaggcagtggagtaacagtgcgatgggacaagaatcagcgcgtcaatacttatcgctggggagccgaaggatgctacgacttgtatatagtggttgaaaaggatggccaagctcttgagcggaagccacttcccaatgataccagttcccgacaaactaacaaagggagggtatccaaggaagttgttcgtgagaacgagcccgaaccactacctcgccaccagttcgtgctataccgacacaaggttgatgcgattacgtccatcatgaatctggaagagcccgatatcgacctcttcttggatctaacgccgtcgggggatcagcggaaacaaggttctagtggaggtaacggagaagcggatagccagagtggcgtggagactctttctgcacttcactcccataccgttacgttgtgtacttccaagacgtcttggatgtgcgacggaggtatgtctaactgctttggggacaactcaccgaaacgctaccggtgcaccgctgggtgtgacttcgatttgtgtgaatcgtgtttgtttgccacggtgatcgacaaaccagtcagtattccaacttcggaagccgctcatgctgaggacggtacttccaccagcgcggaaactacctcagatagtgtggctcctggatctgatgctgaacctgctgtgggagatgcaacagaatctcgtctcacgacttcgatgtcaactgagagtacagaccctttctcctccgtcgatacctcattatttgaggaaagtgaaagggaggcttcactgaagaaaaagaagaaagagaaagaaaagcaagcgaaacagacggaggaagaaatggtcaatgatcttgctacattttggcgcgggctgtacacccacaaggaatgccaggtagccctcagaagaaacggttttcagctcaacgaagcatctacgtggctgcatacgtgtggtgcgtatctgcgagagcctatggtcatccccactgtttcaagtgtagtgcttgccgcagcgccgaaatcaggggccctcgacccagtgttactaatcgccggtacatggtacgctacacgcggacagctctgcgtggtttcacctcccgggttgtatactgtcggagaggaacacagtgacaaaacgaaaagcgcggcaaattcgtgcgatgcgtcctggtttttctcactggagagtggtgcgtcgcttggagataagcctattctactcaagggaattcctgctggatcgccaacgtgcgtggatacgacacggaaacgaatcctcgtgttctcaggttatttaaactgtttggaggagtacgtggatcatgtccagcaaggcgaacgcttaaagtgcgcagagacccaatgcgacacgctggcagatagtggaaaagtgattatcgcgcaaatagctcagctcacgcgaaaacgtgcagctcttccagcgtacaagcacccacgcgcggggctgcaggacatcttgttccgtacaggtcgcgaaacagttggaactgataaacaatctgatggccgaaggagcgagcccaaggacactgaatcgggtacgaaatcaagaaatcgtcgaatgaagaatattcgagcacgattgagcgagttggacaggcttcatgtagaggatcgaccgggccacattattccgttttgtgtcgattttgaggacagtggtttccttcaaatcatccaggcgttcaattattactgcaaacagctttcagctcaggaagggcaccgtgatgaaagcggtgggcccccaatggttaaagcacctgttggtatcaaccgactgatagctgatctgctatgtattttgacggaggctgtgcaagagtttgactttgcgggtgtaacggtgaagatcgatcaaggaggtgaaaccacgcagaaactgttcaaagataccgagcactcattaagaaacgtcgcaggccagctcttcggcgatcaaacctcgacatatctgtccacggatacggtgtcgcaccacgaacggtctgaagttgtgaagtccgcgcatttcctgctggtttgggggcttcgcaagagccttttctgtctgaacaaccggcccgattttttcatgtccacatgcgagggcattatcggctctgcattgcaagaaaaggttccccacacttctctaaagccgccgcagttaccagagtcgttttttgcgatcttgttacagccacacgataccttagtaatgcgaactaagcgtgattgcgaagtggatctactgagaaggcttctctacagtcctatggacgatggtcgcattgcgattgccgattttgtgccaacagaggacaccgagttttcaagatttgtgggggtactgtttgaattgtccaagctcgagtgtagaattgcgcagcgagaaaagtggattgttgacgacgacgggttaccattcatgaccccggtcagcaaagctttgcactccgttatgaattattgcagcgctcgagtacttgctgccacccttgagctaacgccaacaacttcactcaaggaggcggggcaacaagtcttagaatcaattgcaacattcgagtgcttcacaaaggcatgtttcgacagttcactggacattctgcattgtcacgagggctcaagttgctggaatttacgattgtcagttgttggaacgattttaccgatgattatcgccttcatcccgaactttcctgaccacttttcggacgggtttcgcgattgcttggttaccttgatgaagacgctggatactctggtttgctcggatgagaacaagtctgaggcatggcaaccaaaggtggcacgtagtgatgcagccatttttggaggataccaagtagtggaaacgccccatccatacaaccatacgcagccagtgtttcgtcgtgtagtacacattccaggtgcgagtgttctgcactttgagttcgactcgcgctgccgaacatccggtgaagccgacatcgttttcattacgtctgggttagcttggtatcaagtagatcgtctatcttacggggacgttggttttggcgaagatggtgggtgcttctatggctcatactcacgtggaaactggcccgctggtggtcttacgatagtaggcgatactgcgacggtcatgttgtgcgctactactcaaggtcgtagtgggaccggggataaacagcgatggggtcttaaatgcacagtacgtgggctgtatgataacccacgtacatcgtggatccctgagctcgggtgtgctgtagcaaatgcctgcagtgtgattggagacaaacttttgcgtggccttcctcttcaaagtgttgagaaatcatgccagccgtggtcaatgcagcaccagttattcaacttgacagcttctacttgcagaactctgaagtctggcaaatggaaattcatcgataaaatcgccaaccggacgccggaaagcgagccattcttcttgacgctttccaaatatgtgcggcttcgcactttaccgcctcagtatgtaacagctcggtggactgaatcgctgcagcaagctgctgcagctctactcgtccgctcaaactatcggcaactgcatgcgtggttggacagcgtgcaaaaccaaacagctctgcccgaagatagcaaaaaagcacttttcggtcggattggaattgaactggggaagttggagcggtggatgctgcggcaagtacagctcgtcaatgaatggcactacctgtgcatggataaagtcagcttggatgaattgatggagcggtacgcagacaatttggataggctatcggagctatgccagctcaagggtgtcaccttcaagaaaaacgatatggtgggctgtatcaagttgattcatgatcttcttgcggcggaagtggcagtacaagaagaacaacatgttacgacctgtgagaaggcattaagcgcgcacgaagcagtagcacaaactgtctcgaccagaacgctattcttgctgaggaggtgggagaaatgtgtaatgtgtgggagtaccaactcggattcagtctcggaaccacaccatacgggaatatcggaatgcttgtccgatgtaggcaagtttttgtgcagcacagtacctgtatcttccctagaagaatgctcgatggctcactcgagtcggttggagtctcgattggctggtgttgtattctgcaaggaggtaatccaggagctaggcagcgaagacatgactcaattctttgtcgggcgcgtcctgcacgctgttccttcgagcaacctcattcaagacgatggcatattctctggatgtgccttggctgaccctgaccttctcgtaaaaacggaaactgcgtaagtattgttggtagtattttacgattccttgtaagtacttgtattaactctatatatgtatgcgtatgcacagacttaacgggtatgcaaaggcaattgcaaaagcgtcggagtcagataacgagcttcctgctttccgagctgtggctttggcggatgtttggaactgtgcacattccttggacagtatttcgggacgcgtgtttggcttggagaaagtttcgaaattgataatggttttggatggcgcgtgctctgcggatcttaaccctgcagtaggagacggtgcacataccacccggtttccgaatctacgcgaagtacaagggcaagtgcaccatattgcgtggattttgctacgcttgtttgccgaagaggtttttgcttacaaagctgctacggggagctcggatacgtcatggaaacagccgctggagaaagtgtttaatgagctctgcagcctatacaagcattttgcactcaagcgtaaggtgcaaggatcgttagcatcaaatgctagtgagcgacacgatatcacgcaatcaccggatgaagctatttatcgtcttatgtgcacggtggcaagcaaggctgctgatgtctacgagttgccagaagcgttcggatggtggattcaaaacgcaattgatctcatgacgagtgcttctgcagtgtcgaacttaagtgtggcaggcacaagactccttcgctacacgctggagacgtggggcgatgcgatgtttgagcttagtatggctgccaagtgcaaagctggacacagaattgttcttggctcggatattcaagaaattctactgaaacgagtaggagagatgatgtcccccattccgaatgttggtgacacaaaagcagtttcggccgtgacaaacgatacacctgatgagcgtgctgagtattgcgttgtcattttccgaagcgagttagcgctcgaaaaacttgtcgacgctgtcaacactgtgggggagcctgatatcagctcgttaaaaattccgatcggagtgagtgatggcgaggatgccgtggagaaagcggtgactgaagcagtggctgaatgcacggccgcgcaggctaccatgaagcacccgagcgtgcggtgcgacggttgcaaccaaagtcccttgcgtggcttccgattcaagtgcttcacatgtccgaattatgacctatgcatgacctgctacatgaatcagacccacaacttggagcatccgtttgtccgtctaacggatacacctggcagtggtgacctgctacaaccacgctccaagggaggaagtgttgttcccgagacggcattggttggatctaaaccttggaagggaaacttgcttcgtgtacttctcgactcccaaggttacgctgtctattgttctggcagtcgaagcaagtgttgcgatactgctgatgctctcgcgcagctcgggctcttggtgacagtggctcacgcaaacgatgttgtgaatgttgattattcacatgattgggaaaatcgagttcagttctcgtttgagcctggttcttcgagactctctcgccgttcgaccttgtcagctgagaaaggtccagccagaagaactagccgagatgtcgtcaacgcctttaataggagggcggctcaagtcaacttgatggaacggcagaacggcgaacaaatcgaagacaagcgagcgttggcttcggagatggtcactttgctacgtttaatgtcgtccaatcgaccaacaatgccgaaatggcgtagcagcactttgaaaatactcaccgaaattctagaagatgctcctcgccagcttgcggtagtcgctgattcggctccctttccaagtgaagcgtacttcttgactgtaggcgcaacccaggttcttggtgggttccgcgaacctttacgtgttggcggagttgtttcattgttggggtatgctgccgacaaagctagaagtggacatactggggtgatttattcgtacgctttcggcaacgacgacattataattgcaactatggattctgccgaaggaaccagaaatggggaatctgagagcgatgatgatattatcttctaccagcatacaacctcagaggttcgagctgttagcggaatctctcttgacgaagacgctattcaagcgcttgaaccgcttgtggtttcgttttgctcggtggtaaaacaaatttacgtgtggacaacggaaggggcggatgccgattcggaagaagacgatgcttcctcagctgcatctctactgcgttgggagttggcatgcgctcttattcaagcttttgcttgcatggctcccgcttggccatcgctgttcgataaccaggtgatctctgtaagttgtctatgcactctacgcagcatttgacttaaacgctgactaatgttattctttgttgttttgtgcaacagacaaatggcaattgtcccgcgattcttttccagcttgcgcagttgtgtgtgcgagacttaaaggtggaagacatcgcagtcatgcgtgccaggctatggcaaatggagtggctccgctcacgagaaatgcatttctcactcgcaacgcgaccgatttcatcaagctccttttcggcttgcgacgagaaaacttctgttcttcgaccaccaatgaccgcccttaacgagttatcctcttcttcgggaaccagcagtgatggaccgatgtcgttgcctgacccatcggagtatttctacaatctttacgcgttttcatcccgcacagatttgccgcaacattcggggcgaaacaaaatgctggagtactgggagaaaaatgtgataccagcgattgagacgtacgtgtcgggatctttcaagagttacgaaatggactacttcttcgctcagctacgagaaccgttacgggaaggcaacgcagccgctgcactgaaaattgcgttcacactctgcgacggccatgtaccatccggctgccattacccaaatccagacacagattggtccgcgctgcaaattgatgatgtggaagttggcggtcgatatgtaattgcttctgaaaatgtagatgttgcgggctggtcgcgaggtatgctgtggactttaggtcactctggtgttgttcgagttgtcaacccgtctggcatggtgctgcttcagctggtgaaccctgtgacgtcagctagtgagtactggtggtataatgttgacagtctgcgttcgaaatcgtcggttacgtcagtctcggagcaatcagtcacagacttcgaggcgagcagggtgaggcttaaggtgatggaccaacaactcatctacagcttagcacggaagagcgtatttgatttactgcaagttgctcctgaacatgccatgaaactatcgatcgagacaagaaaagcaagtctggttcgaacaagctcgtcgccttttccgttgccatcctcgtcgccagcagctcattctcaaacacccaaggcaatgcagctagctgcaccgctccccaagaacctggacagtcactataatctggctgacttgctcaaactagctgcagcagctgatcttggatgccctgaaaaggtgctgtctttcgagatgggaacagttttcgaatcggcaattggtggctcgactgacagcagcaccagcagcaacctttatttacgaccgaaagtgtcttcaaggacggcattaatcacggtgttgcaggcagtattaaacaaacagtttgagcatgctgctgccagtcctctgcccccagtcatggatcgatcaacatcttacgatgagaacgccagcgttatggtaacaaagccggcgaaaaagcacaagaagcgtgggaagcatggagcccttactggtaaactagctgcagcaacatacggtggtgcctcctctgttgctgcttcggccacgtcgacgtcagcggcaggttcgaacacctccttaaaatcttcacaacccaagctgcaacaacccgaagttattcctgcactttccacacggaagtaccgatacttgctgatggaggcgctactagctgagctaaaagctagtttggacttgtccagtgcttttttgcgaagcagatcctttatggtgaccagtgatagcccaccgcaaccatcggttctcatccacgtgcccgacgcaacctgcttagtgctatctttcgcggttcatcccgtgctgatggatctgccagcaggcagcagcctggagttcttccgtgacgagaggtgcacagatcgcttgttcgggtacttcggggataagcgtggacttagctatctaccaccactcgtcgtcccaggcgataaatgttatgtacggatgtcccagggaacgtacgctcggtacaagtttcgtgttgatgctttcacggccgattttggactggcgctttggttatgtgaggagatttaccagaagttgctgtcagtacagctttctcattacgaagtggagaccgtattgacaactgcattgaatgcgctggtcgagtacctcatagcgactacgggttgcctcccgtcaaatgcgaagaccgctgtttatcagatcaccacaaagctgatcaactttgcgttaggcaagggggctatgcacgctgtccccattgcgaaactctcgagcctggtgaaagagctaacgttcgtgtatgataacgagcggaccactcaaaagggactttattctctctttacgcagcagctcgctgagttaatttccttggttgaagaagtgtcctcgctgaagggtggctcgtcatcaatacttggaggcacatggtggaaagagtacgtgcgaatggcggtgtttacaagagtgttgacacaaggaaagcgagagattgctactcctgacgctttcaagcgaatttactgtggtcgtgcacctattcgagaagtcgaggcagcgcatagtacgctgtcgtctcacgacttgttcggcgaaaggataatctttttgcagaacttgccccgtacatcgaatgttgcggacttggaggcaaccgtgtcacggttccttgtgcacctggctttggaggagtgtggagaagcggatgaccaaaacgtgtattcggccgcaacagtcacccggtttggtattgtatccaatattctctatatgccaactgatcaggagggacaaactcttggttatgcgatggtggacgttggtcgatcggatgttatcgcaaacttgctagctcggattccgaaggaaacattcgagttcgagggcggaattccgacaactgaagatactgaactactagcgaagattgacgctgtgtgccgaccccctgatacctcaagcagtaattcaagcgacggaagtgtctgttctggtgatggcgcagacccaagcagtgacgcttgggcttgtagtgtatgtacgcttgaaaatgccctgtccgacgtggagtgtgctgcatgcggttctcccataccccctgaactcgcaagtctggctagagaagtgcaggcgcagtcacagcccccagcgacaccacacgcgtcagctggatctggtgatgctgccgcagttggttgggcatgcactacttgtacctttgtaaacagttggacagacacgaactgtgacgcgtgcacgatggaacggagcgcagatctagtacccccttccggcggcgggaacgacactggagacgatggtacgaatagtgatggaggcccaagtggtgcagaccctgatggaagtacgcaatacaagctgaatgctgctcggcttgtggacatggtacgcgtagcggatagtactggtgaggttcctgtacaagttaccgggttcctacgccacagattgcttcagaaaacagtactaggcaacggcactgtaaccggtgtgtctgtcgagcttcacagtgcgcttacacgagaagcatctcagtactgttcatcaacggatagcaaactggcaatagacgcattcgctgcgcttgttggtatgaagaagggacgtggatgggatgcaatgtctagtgaggagcgagcgagcgagttaatctcggctgatgccttagcgaagatcgtcgaaaagcctctcgcagtgtacaagtggatgcgatcatctggttatgatcttcaatttgagctgagtcactatgggtccaaggatgacgcaatggcagcacaagcgaagtggtcacatcagatggattgtcaactaattgcagtgacccgggagctcagcgggagaatgggtgtgcttatgctgacggatctgtgcccaagtcatttgagcgcaaaacatgctcgtgagtactcattgctagcgtcgcttgaaactcgagacttgcgactacggttctcagtgctgcagtcactcaacaaactgttggtgggagcgttgcctcttgtaaaccttcgtttatggagtgacccaagttcgttacgtagtcgcattgtgtcgatacggcagctgattttccctggagtcaagattcgattcttcgcgcaaacacaagataacatcacattggcgcactcggcgtttattgataacaatgctaagcgccccatggtaacgattgaccggagaaagatcgctggtaaacgtggtggaattagttacagcggtacggacgcctcgcctccgtcgttgacgctgcgtgatcccaagcggtcactgttcgcgtccacgatgaaacagctcagcgcgataccgccttccttgttgcgagcaaagcggcctacaggtgcaagcgatccttttgtatcgtttattgtgatcttcgccggcgaaaacgtggtgggcgaaggagggccgtaccggcagctcttcaatgacatttcaaatgagctactcgccagcgggaacccgctattcattccgacgcaaaataatgtgatgaaggccggcgagttccgggagcgcttcatgccaaaaccaagcagcacatcaaaggagttgctgcaaatgtttgagtttgtcggaattctgatgggttgctgcttacgaacgggtgtacgactcaaccttcgcttggcgcctctcgtatggaaaatgctggtgaaacagaacctcgtcctggcggatctcgaaagtgtggaccactcgttgtgcgagagcctcaagttcctcgaggagctagcttccaccccgagtgaaggtcccgacgaggtgctctttgattcattcaccacgacactcagcgatggcacaattgtggagctcaaggagggaggacaacatcttccggttacaaaggcaaatgcgaaggaatatatccggctagtaaaagcgactcgactgcaggaatgcaagcctcaggtggatgcaatgctgcgcggcctcggcaagatcgtaccggtgcagtcgctgcagctgtgcgtttggtctgagctgcagcaatgggtgagtggcagcctcgaaatcgatgtcaaactgctcaagaggcacactcgctactcgtctggcatgagccccgagcaattcccgcaccttgagacgttctggaaggtgctatccagcttcagcgaggagaacaagcgtcgcttcatcaactttgcttgggggcaggacaccttgcccgcggacgacgctgagttcgatcgcacgcacacgcgcttactgatcaaggctccgcctcaagatgatggagtgaaccaagatgcgcttctacccaaggcggacacgtgcttcttcaacatcgaactgcctgtgtattcgagcgaggaaatcatgcgagagaagctacttctggctattactctgtgcactagcctcgatggcgacgaacaggctgcaggacacgatatttattacgctggtgacgaagttgacgacgatggcatggagtaagggcgcgtgtgcttcatgttacatgttgaacgtaaaggaacaaataaagcataggattgacaacaaacgtgtattgcctagaacgtgacttggagctcaggatacctctccttcactgctgcagccgcttccttcgtgaccctagtagcatgaagggttagcattatgcgcagcagcgtatcagcagtctacagtacttacgtcgtatagcggaagtcgatcttcttgagtcgcttacgctctggctcagggttctcgtcaggcgatggctgcggcaccgcagggtcgagcagctcgttcctcgctcccatcttcgcatgaatcgccgcgacaatcgcctaagcatgcagcaaagaaacagaaacagcaaagatcagtcatttgcatcgtattatggccagctcaatgaaaacttacgtcagccgaaacgcttttgacgccacacaggttgagttcctggaggttccgggcttctgatccaaggaagcgcagcaagttatcgctacatctcaaagcacagataaccacatcaaaatttagatgacgaaatgatacggaataacgcttgctgcgataacataaaactcacgtaatcgcgatattccagtgcaggcacaagcgggatacggattcgcgcttcttgagcagcgcgattaatgcctcgtccgtgatggagcaatagccgacactcagactgtgcagcttcctgcacttagccatgatagtcttgattgtcctacaataatgaaagtacgtaagcgccacgctgcatctataaatctggactttgagaacgcactggtccgtcacaggatggcccgagatgtgcacccgcgcgaacttggaatggttcgggtgcttttcaatgagcttcgtgatgccagggatggtcatgttgaagttcccgccgacgtcaatgctctacagcaccagacagacaaccaacaaaacaacacttccgttaccacatttttccaccaaaggaccgctacagcataaatgcagcagatccaaacctgcagcttcggtgccagcttgcgcaaatgatccagcgtcacgtccgtcagtttgcggcagttctcaatgtccagctccttaatgtctgctccacgaacagaaccgccaacacgtaaacacccacaacttcatctccaacacctcaaaagcggccacaccaacctggacagttcgtcagcagcacctcaatggcgtcgtccgtcagccggaagcagcccgagaagtccaccgagtgcagcttcggacagatcttggacagctgcagcacccaacagtcaacgaatgacacacatcagtcctccgatggttttatctctatcctctcaatgggtcgcagtcgccgcaccatctccacgaacttggtggagatcttggcgccgatgatctcgatgcgcgtcatggacgcgtggaagaagctggcgggcagcgtgtcgtcgcccaggcggccgccgcgcagcagcgcgcggatgacctcctgcttggccttgtgcgtgcgcgacttggcaggcttgccgatgcggtgcgcgcgctccagcgtctgctcgttgaggatgacgtccagctggcgcggggccttggagatgaacttgagcaccatcttgtccagcggctgcacctcgcgccggaacgccatggctgctcctgccctgctctgcggcgacagcaccgtaaagtttgtgggacgcgaggaaggtggcgcgaaggtggctggacacctgtcgcataaatgaggtggcgcacatacccgttaaattgcttcaatacataggtaccttcatctcacttggtaaacctcccgccaccccccaagtgactgagtcaaagtctcgttagacgcacgccatgaagttcggcaagcagctcgagatctcggccaaccccgagtggcgcgacaactacgtgcagtacaagcggctcaagcggctgatcaagcgcgtggccttcgaggtggagaagcagcagaacaagcagaagaagctgcagcagaagatggagcacaacgccgccgccgccggtggtggtggcgacgtgcaggtacacgtggtcgtggacgagacgcatccactgctcaaggccgtggtggacgaggtgcaggacgccaaggaccagttctgggaggtgctggacgccaacctcaagatcgtcaacgacttttacgtgggcaagatcgtcacgctcacacgctccgtgggcgagttcgaggccatgctcgaggacgagataacacccacgggccacgtgcacacgcgctcccgcacgcactcgcagggtgcgtacagaactgcaggagctatttggtaggatttgaggaaacggagtgggacctgacgttagcgctctgttggttaaactggtagcggaccacgggtttgcggcgctgcaggagatctacgacacgctggtggacctgcgcacgttcgtgcagatcaaccactcgggcttccgcaagattgtcaagaaggtgcgacaatgacggaggggcggtgggcattagtgagaacttaggcgctgagtggttcctgtgttggtgattgcagtttgacaagacaatcaaggcgcacacgcaagctgcgttcatggagcggctggcaaatgagcgcttctacgcgtccactgacattgacgaactgctggaccgcgtgtttggactcacatcgaagtatggaggagcgctgtttattttgtttggggtgaggtggtattgacgttgcgggatgacacctgttggcagagacaaactcgaggccggcaatatggagcgccgcatgcagcggatgcagggcgaccagaactcgctgttccgtaaagtgagttgctcgagatgatcatcgatacgttgggcctgttatactgaatctgggtgcccctaattttgctgattatttattgttcaggtgaaaccggtccctttctgcatctcagtcgcgctcttcgtgctcctgctgcttgttcgtatcacccccgaaggtaaggctgatgttttagaaagcgttcatgaatcatgaaatttgtcttaattcgcatattttgcaacgatacaggtgaagatgtgcaacagcgatgcctggcaatgctggtgttcatcacaacattgtgggtgacggaagcacttccatactttgcaacggcactgcttgttccgccccttgtggtgttcttgcacattctaaatgacaaggctcatcctgacaccctgctcactgccagtacgtatttaatgcatcctcgggtgttcacctacgcaaatttgatgtgcgattaataatgttgttttgttgctacagagcaatccgccaaggaagtgatgtccatgctggtcaaccacaccaccattttgattatgggcgggtatgttgtagaggtattcatgaaaactcttccgatctatttactaacgtacttttctttacgagtgatgttccagttattctatctcggcggctttcgcaaagtgccagatcgagctgtacattgcagcattcttacagcgtcgtttcaagaagagcccgaaccttttcctgctggcaatcatgctcatgggacttttcctgtccatgtggatcagcaaccacacggctcctgtgctgtgcgtgtcggtaagtactccacctccaagatctactacttgtatgatgatttatgttgtatcctaattgcatgctcacacttcttttaactttcaaggtcctactcccaatcatccgggatttccccacggatagcacctatgtcaagacacttctcatcggattggcctttgcatgcaacctgggaggaatgatgaccccaatttcttccctgcaaaacacacttgccgtatcctttttggagaaggctggctacacggttacgtttggtcagtggatgacgatggctgttccattctgcacagccggcactgtgttggtaagactctgcatccatacactagttggtgccaccttcgctaattttctcgcttctgttgtgcccgacagtgttggctgttcttgctgtgggtgatggaccctcaagatgctacctacattcctcaaattgtctacgaccagaagcaaaagatcagcagtctccacgtcgtcgttgtttcaatgacgctcctgacaatcttcttgtgggcatccttctcggtgacaagtgctacttttggcgaccttggtatcatttcgatgatgttcatggtacgtacaacgatgacttcgaatctgtgagcgaactcttgactcatatctggtggttatttgtatttgcagtttatcatgttcggcaccggcatgcttagccagttcgatttcaattcattctcatggcacattcttttcctgattggcggtggtaacgttttgggagacgtaagttgatttatcacggtgtgataatggtctggtattagtactaacctaaaagatattgcttgttttctgcaggccgtacaacgatcaggtcttctcaacacgctgagccagtctgtcatccatgcgctgccgtccggaaacgtgtggatggtcactgtctccctctgctgccttgtgatttgcctgacgacgttcgtttcgcacactgtcgcttcgatcattctgctgccgataatcgtgcagatggcaattcagatcgggcaccctcacattcccgtaatctgctgcgcgctcgcaatctctgctggtaagaactttgactgatttggttattcattggcgtcatttactgacaacgcgatttcatgtctacagcaatggctcttccgttctcgtccttccccaacatcaattccctgttggtgctggatgatcacggccagccatacctggaggtgaaggacttcttgcgcgtgggtgttactttctcgctgatttcaatggcgttgattgtcaccctgggctacggcctcatcgtgctggtgctgggttacaacatcgacccgacgccaattatgatcgacctttagacaaacaagtgcatgtaagcgctacgctcgagtcttctacgcgattcccttatgcacattgcaggggagatagagatcgcgttgggctcaagccttgcatcattacatattactcgcgcagctaaaaactgaataccaacaacattcttcttatcccactgcggtgctctcacaagctaaaacgatcggctatacttcttgatctcgtacaagatctcctgcgttgtaacaatttccgagttaaacgggggcggccgttggtagctccgcttgaccgtctccacgaatcgcgtgtagtagagcagcaactgcgtcagcacttgtttcaggatctccatgccgttgcggaagttagcgaagaatgtcatgacgtttccgttcatcttctcgattccagctttccacgttgcggcaaactcacgcacgatcttttcgatctgcgccgtatccacttgctggcttcccgcggtagctgccccactcgctcctttacctaatgtaacttgttcgtgctggcgaacgaactggatgagcttcgcgtagtacgtcatgagctcttcctccacaaacttttcacgctgcccagcaaggagctcttcaaactttgacgtctcgtcggaaatcactcgtcgctcctcgaaatgtgtgagcacaaggtcgtagttgttaatgaggaatacgcacttgtctttcgcattcgagtgttgttcggacagtcgcgtcagcaagctaaggatctcgtcgcgcatggcacacaaattactgaggaccatatcacccgcgccattttcatgcatctgggcgctcgagatagccgagtcatcactgccagacttggaagactggttttgttgcgtgtagaggctcaagctgagaatggatgaagcgaactccgcgtaccgtcgaatcacaaagtgggggtggaggtcgatgggccccagcttcttcaccttcgcatttttaacactcatcagattgaggtcgaagacggccttgaaccgcggccacaacagcagcgccacgcgatcgaaataagcgtccaggcacgggatgcggcgcttttccatcaccaatctctgagcgtacgttagccggatcatgagaagcagtccgatagcgtcgtagcacgtaaagaggtagttctccatgttctcgaggcacagagacagcgtcttggcaaaaacacggagaaaaaggtcccggctgcggaacacattttcttgttggttgctgggcttgaaaaactcgatcaaaaagagatactccgacgtcgccgagtccatcaaatgttgctgtacgttgcggaaaacagcctcgtagggcagcttcaacccttcctgctgcgccacatgcaaaatcagaggcggggttgatgcagtctccaaaatcttctcgcgctccgtgacagagaaggtgtcattgcgcttgctcaagttcacgcgagagctgaagatccccttgagcgactgctcatccaccacaataacatccgtgcgagcagccacctcctcgtgaaacttcatcagcccagtgtggtacgatcggaacacattcaccagcgtcttgctcatcgcctccgcgtacacttcacggaactcctcctccacttccggcgcgttatccgccaaaaacgtcacgaggtacttcataggcagcagcgtgttctgctgcaccatctgcacgttggtcttgggcttcttcacctcgttcatcttggccagcaggaactctctgatccttgcaatcgctcgagccttcagcttcttcagctgagcttccacatctgagaacgccgcagtctgcgacggcaccaggtcgaagctggagcccgacgggtccgggtcgctcaacgcagcgtagcggagcttcccgttgagcgtcacgagagcgtggaggtaggcttcattgacttccccctcgtcaatggtcttcactagggacggagccaccgccacctggtccaggtacgtctgcagcttctcctctgtctcccggcggttcttgagcttgacgttcatgccgatggactcgtcctgcaggtggcggatctcgtcgctgatgccgcccaggtcggcctggaagcccagcagcatctcctgcatcttggccagcaggttgtcgcagtcctgcacctcgtcgtgcagctccacgatgtcggcggacttcacgacgtactgagctacggacgccgcctcggcctcgcgcagctcctgctcgatctgctgcgcgtactcgcgcagatccacgcccttggacagcgcctccttgatcacgccgtcctgctggaagagctccaggtagtcgtccagctcgtcgaagtcgatgtcgtccaggttcacggccgctgcgtcggcgccggcgtcgccgcgctttgccatggtgtcgattttatccactttggatactgagctcaccgagcttttgttaattttacgctaacgttaacttgatttttcagagaataatttcagaagagatacagatttagaagttctaaatttactctcctgacaagaggcagggctaagatcttgttcattcgacttacagaagagcagggctatacagtccttccactgtagagcgcctacttgtgatctctgatctgaattcgagactggatgaactcgcgcagatccacggcggccctggaaaggaagagtagaatgagcgtaaggtttcgtaacaacatgggggcagcgcgggggggacgtacttgtagtagttggtgtcgggcgtgttgtacgtcgtgcagttgtcgcacatcttgtcaaggtccgccttgaacgcagctttggagatgtaggcgccgctgtcgatgcgcttgctgatgagctgcaggtctataggctccttaatgtggtctaggtagtcgaccacgacggaagtgtccacgggctcgtggaacggccacgcgctgcgatggctcgacacggccttcaacaactgggagagctgcgacttcagactaccttgatcgcgggttctatacaaacgaaaataaagcaagagtatcagaaaaactgtatacgcccaccgaagggagagcaagaaagaccacgcacccgatacggttgttgcgaatcgttgcctgagaccagccagcttcctctgtaagcaagaaaagcgatgctgtcagcgaaactgtttgcagaacatagagagcaacagcaacacgcgtggaacaaacacttactgacgccggggaccatgtagatatccatcagcctgccctccgcgaactttgttaggcccggatacacattctgagatcgcgagcgttctttgatcttcttttgaatagcctgcgcatacagtcagaaccccgcgtcagcgcactgccagctttcaagttacatacagcactgatgacgatatacctcgcgctgcatgtgaatcatcgacgtgatccttaaatagttgatctgggtgtgaatggtgcactccatcagagttccaccgtcgtagtccttgatgtagccgtaccagttaggccgagccatcgatacacttttggtgaagccttgcttcttgaagtacccaatagcgtagttgtcggcatacgtgaggaagtgcgtgatgttcttggtcttgacatactccttgaggtgattcatcaaccgcgtaccgtatcctttcacctggtccgaagcgttaatggcacagaatgcaatctctgcgaagtgattcttctcaaagggacggtagcaaatgcctccaatcacatgggtgccgttcttgaggatgagcatcgatcggtggtttttgtcgaaaaccaaccgaacaatgtattccttgggcatcttgggaagttgctttgcgaaaatgttcttcaaagtggtgagctggatcatgtgctcatctgtgccgtcgttcgtgatgacatcgaacttcagtcggccgctatcctcctccatcttggccatgtcgtcacgggagagcatcacggatgccgcagttccatccgcagtagcagattcagaggccttcgcatcaggcgcatccaccttttgcttctttgcagcaggttccgacggtgccgcaactccgtcgactccgttagaggattcagcagcagaagtagcatttttctccggctccttacgcttggggctggtcgattcgtcctttgcatcagctcccacttgctttgcgtcgacagtcttggggtcatcacttttcgtagccgcatcaccgttagcagaagttttagctggagatgagactagctttacaggggtgaccggcgcttccgagactttcttaggcgaaccagaagctgtcgcatccgagcccgccttagcatcttcggagttttcattggtctcttttgcagcagcttctcttgcctcctcagcattgctctcgctcttagactcctccgcggtgctctccttcatctccacatcagcttctgtagcttttgcgtctgccgcagcaccctccttagcctcagcctcgccattgactgcagactcgtcatcctcattcttcgcttcgttctcttgcgccttcatctccacgtcggacgactgcgtcttcacctcttcggctggaggggcatccttctcatcagccatctccacatcgccgctctcctgcttctcagtgggtgctgcatcttccttcttagattccgtctctggctccttcatctccccgtaaccctctccttgctgctcagactccgcagtttcaggcgaacccccgggtgctggcggcctctcggcatcctcctctttcttcgcctcattggcctcgttgccttgcgccgactcgtccgtgttctggctcgagcttccgctggcaccaacgatttcatcggcgggtgccgacgaggtctccgccgtcatagctcctgggcgagttgggcgaaaagtggcgggaggaccagtgtacataaattctacacgaatatagtgtacggcacatgtattgacgtggaaagattgctacaaaggcaagttgcagttgcagaaagtttggccttcctcaggaaaggttctcgctcaatgccgcaagttcacaagtcggcattgcagtggttcagccttctagaaccaccaggataataacaacagcaacggaagctaagacatgcatcagcttagctttcttcttcttcgcgccagctggagcctaatctctgcctgctagggtagctgcaaccatacgtcggctctcctcaacaacacgcagttcggccgtaaaacgtcgtgcttacggcagggtcaaatcgcaaaactattcaacttcagcagcacggtttgcggttgcatcggcgcttcaatttgaactgctggccacttggtttcactatggcacggaagagcattttttcgcagattctttcgttcgcactttgaagttcccgctgcagattccagattcggctccacatcacaaaaggcaacaaccagcaaacaagaagcaaagacaaccaggcaacgaccacgactctccacctgagaacaacgatgctggactcgctgctgcaccgattcttcgcccccggcgccaaggagggcaaggccgccgacaagcccggcgagcaggtgtcccaggagacggccttcacgcgcgaggccgacgtggaaggctgggtcttcctcgcacaggagcggcactcggagccaggctccaaggcgcgcagctacgccgacgtggtcgcgggccggacatgaagaacgccacgctccgcgcgagagagcgtcgcgcaccgtaattgaccacagtccgtcgagaaccctcgcacactgaactgcgcggacgagagacttcgggtgcaccattgcaagacgcaggacccaggtgacgagggctcccccatcacagaaataattcttcgtagcgcgcacgagacgcggataaacagttttctcttttgccaccgtagacgctgaagacaacaaacgcagcaagtcaaataacaattgaatctaacctgaagtggtgccgatggaattgaccacggacaccttgcttgacgagactaattcaactcctcatttgcattctggaagattggcgcaagcgaccaagaacctactagacagagctcaagttgacgcgatccacgaactagcggtgaaagcacggaaacacgttgccttgaaagtgcaagcactttctctccaagagtcttgggccaagaccaacgatgaagctagccatctcacttgacgatactaacctagctccttcattgtaagccgcgcaaaactctagggatgagttgaattggtagccaagggtcgaggaatagcgattttggcatagatcgcagtagcgtatccagtggtgcgtcttagactacgtgtagctgcacaccaggttactgaaggccttcgtggttttgaagttacgttgcccttgtgaagtcatgattgtcatttaagaaagcaaagatgccgtggtgtcgccgccgtggtgctggtccccgcccgatcattcgacgcggccgtgcgagccatcaccaagagcagcaacgtgaagtgcgtgcacgtggccgagacggagatggagacggccaacgaattcctggatgtgcgcttccatgccgccaagaaagtacagcaccgagcatggtgtagggaggcgactcccatagtcgtcgccaaggcctacgacactcaacgacagcgggtgcccaagttggtatttatctctaacagctcagagtagcctccctatggcaggggctgctgcctacggtgaaatcatttaaacctgctgctgaagtgatattatgaactcccgaatgtcgcgaaaatgatcacctacaagaacacaaaaatggttgtgtatattggtgcgtttctcgagctagcagcattaagctgctccctgttgaccactcgaaatcgccagtctgaccagcatgatcatcctacggaatgggtttgatctgaacaggcaggcaggcagagataggcgttgtgagataccaactgcaagagactttgctcatatggctgaaacaatacggtaagacctaccttgaagtgcagtgtgatgagcgagaacaccaaacacttgagatcctgcaccaggtagtacagcacacgcagaccctccgggtccttgctgtcctgcacgtccagcagcgagccgatcttcgcgcactgcaaatgaaaacatgtacaaacgtcagcctattggcacacatataatcgcgcgatatcaacttgccaaggcataccgtaaacgagatgtggtcgtcacccaacacgacctccagttcctgccgtccgacacggtctggttccggccactccttgtcatcttctctgttgaggcacagcagcacgttcccacatcagcattattgcatgctattccagcaactagaaggatggtcccgccacgtactttgtgatttcgctatcgctaatgatccgcttgacctcgtcgatgaccgactgggacaccgtcacttttgaaacaaaagagccccagcaccacgttagcaattgtctacatagctccgccatcaccacattatttgatcaacacaagtgccagcccaccttctttccggatcatcgagtccttcttgtagttggagttgttggcgtaacggagcttcccgtccgcgcggaactcgaactccatgaactcatgaccgaacttgccgcggtggccaacgctgcaaggcacaaagcagacatcacagcaacaagaacgtcagctaccaccacaccagtagcctcctgcgtacattcaccgcctgtacgcactagtagcgaacgtagaagtcgtcgtcgcggggcatcctgtcgctctccggcctatttgtcggctgtaacaagctgcactgaatatcaaccaatgaaagcgttgtggggccaccatatttcaaccaatggtaaggtcccattaccgtcttcattgatgccgatacaattgattcccccagcagaacgtcgcgcggcccgtgagtgttgccgtgtatccttccgtgactaggacaccgcagccgctgctccctggagaactgcaacgtgttaacactatgcttgtttatcgtatggtgtaaaaagaagccgcaaagcctctgtatcctaagccgagaacgcaagcgatcaaccaagctaacaccgggctcatgtctgcggaaggagcgccactaccggacggcttgcagtctccggctcggagaacaaccaatgcgaaggctccggcaaaagtagcagggaagaagcgagtaggagctgcgagtaatggaaccacgaagcgggcgacgcgtcgagagctcaagaagctgacggaggtggacctggaggagaagaatgacattccaccaggtgggtttgctgcttgtagttaagctattttgaagctagttattgtgcgcttaacactgctattttgtttgctatgtgcgctaaaatctagagatcaaggtggaggccacgccctttggtcttgatgcagccagcgcgtcgatcacgcccactagtctgcatgacgacttcgtgaacatgatgaagacgcagggactggagaagatggccacagaagcagggcttttgcgaaatggctctcttgtggagtcgcagcaattggcgactcctgcttcagctgcaagtacccctgtcaaatctggggccggaaagaagccggcgtcgatcccgacgccgctcccgagcccgtcgttcactagcccgtacgtggatgccctgcccgttatatttttcttactgattgaactaagcactgatcggctgtatgctttcgatgtcggtatgtattgtgcttacagttcgccagggaagaagaggaaatatctgaagatcaacaaaggcttgcgccatttcagtatgaaagtctgccaaaaggtagaggaaaaacacgtcacgtcctacaatgaagtggctgatgaacttgtgcgcgagttcgtcacgatgcgaccaaatgatgcggtaagctggcgcttgaggacaaacggcatgttgcaaaggctcattgttgagtgtgattatttaggtctacgatgagaagaacattcgccggcgagtatacgacgcattaaatgtgttgatggccatggacatcatctcaaaagagcgcaaggagatccgatggaaagggctgccttcaaatatgcagcatgacacggaaatgctactggtttgtttaccagtgttgctacaatcctttgcagtggtaaaagcgtgcttacgtactctgtatcctgtgtcaggcggagcgaaacgagcgtatgaagagcgtggagcagaaaaagcagcatctgcaggatctcctggtgcagcaagttgccatgaagaacctattgaagcgaaacgccgagcgaaagcgcaaggagagtgagaaccccacagccgccacgattgtacgcgacgaagggcgggtgtttctgccattcatcgcggtgaacacaagtaaggacacggtgatccagtgcgagatgtcggaagatcgccaggacatcttcttcaacttcagcgcgccgttcgagatccacgacgatgccgacatcctgcagaagctgaatctgcacaaggcgccgtacaacgatctcaagcagatggtgcccgacaggctgctctcgtaccttccggccgagtgtgagatgaaaagcgaggagtaacggcaagcaagctttgcagataggtaggtaggtaggtaggtagtagctttatgggatactattaggggtaactattaaacatgcaacgcatagttgtccagatactaaaatgccacgatgggcccatgccatcgaagagctgggcgaggcagtcaagtgccacgttatattgtgtaccactccagccggtacccagtgtgcctctgaaatccagtgtgcttataagatgtggcaggtctcccatctcagctgggcggggtgggggatcccatacaaatacgctgtcagtaccgcgtaggcgagaaaaagaaacaaagcgagaaggcagcaggaggcgagcgacttccagtctcccattcggtacccgcgccacccaagccacgccccagccagccgcagagacggcaggacgcagcacacgccacagcgaggcatccagcaaccgtcgacgagtcgcgcgaatcagcgagcgaagaaagccaggaggatctcgagcgttcttcgagtcagccgagacaaagaagcactttaactaaggagaagaagaagaaaaagtcaccaggatgtcgcagggaaagacgtgccatttcaagctggtgctgctgggcgacacggccgtgggcaagtcttgtctcgtcgtgcggttcgtgcgcgacgagttcttcgagttccaggagcccaccattggaggtaggcctctctctttctctctctcgttattacctagacgcgggatcctgtcctgcgctggacgcggcatggaggatttgtatgcgctatcgtgggagtgtgaggatggtcctaaccgtgtctgttgttcttgtgcttctgcggcggttggtgattttctttctacttgtagctgcttttcttacacagacggtcggtctcgaggacgggttgacggtcaagtttgagatctgggataccgcaggacaaggcaagtgtttaaattctgctgctgatgcggcaagctaatgaaggtggtgtgggtacattgacttacttttgatgttacgttactccatgtgtgcagagcgataccgcagtttggcgccaatgtactaccgtggtgcggcggcagctatcgtcgtgtacgacgtgaccaacaaggtgcgaactggtggtcctcgggcaattgtcgcatggtcttgctgatggttgtcgattgtgctatcacgtaggactcgttcacgggcgccaagtcttgggtcaaggaactgcagcgccgtggagaccccaatgtggtcatcgctcttgccggtaacaaggccgatctcgaggcccgtcgcaaggtggagttcgaggaggcgcaccagtacgccgaggacaacgacatcctgcacatggagacgtctgcgaagactgctgtgaacgtgaaggacctattcgttgccattgccaagcggctgccgaagaacccgcctcagcccgagcgcgaggcgttccctatcaccccgcctcaggcgtccaagtcgaagagcggatgctgctagagccctcacagctaacttctgactattggatcctgcagcttttaacgtcaatgcgatctccattcatcgtgaccaaccgaagatccttagtttcgaccgcagttcacttcctggcagatggacgagtgggtggagagggagaaaggcaaagggtggaaagagttaccgacagaaaagcaggaagaaaaagaagctatcgctgcgcgtcggcagaggtgcgacggtagatgtaatgtgagctgtgtggtttttggatagggcaaagcttttgctttctgttttctgcaacgcttaatcacagcaaggcacgaaatgccacgttacgcatactaagacaacgtcgaaagtgagatcatggcaatcttgttcaatggttcactgcatgggggcatgcagcaacgcagcaaggtacacgtagcaaatcaaacttcaagaaggcaggaaggagcccagtccactctcgccttgtgctctccagctaatcgatcacgctgtccgtagtgtagactcacaaaagatggaggtcgccgctgctgacgtggcaccgcctcgacgcacgagagcgcggctcgcgctgcgctcttgacgtacagcctggtcgtgagacaccctcgcttacttagttcttcttgtggtcgtcaatgccgaccgtggagttgatgccgaagatccgcacgcggtcgagttccggcagtttggccaggatgagcgtcgcccagatggggaagttgatgagcaggtggcgcgtgtcgtagtccgtggcgaccgacgcggccaggaagaggaacgtcgggatcatcatgaggaacttcttcgtgttggtccacgggtggccctggtcgatctgctcgtagaacgtgagctcgcggtagtcgcccatcgagttgtcatcgggcgagcccttgacccagtgcatgatgccgaacgagacctgcagcagtagcaatcatatcagtacagaacagccccgtcaagaacagtgtgatgcagagcactctaccccccccgtggggcgcgtaccctaccctacagactgcgagatacaagcagacgtaccacgccgtggatgacgttgaccgccgtgagggcgtcaccgtgtgtggggaagataatgggcatcgccatgtacagcgaggccagcagcatgatgtagaaggtccagaagccgcgcgagtccatccagttgacgttcttgttcgtgtccacgtgggccgtcatggtgctcgcttgcttgctagggtcggtgctctgtgagcaggaggaggaggaggtgcgtccgatctagatgtcgctctgctgctcgaggcgtggagctgcttgtggccgcttcttctgtttcgtttctttcgacgggtttgtcacccaaaacgcttccgcgcacgctgattggcccgctgggttgggcctaccctaacgcatgccgtatgcaggatatcagttccctcaccgcgtaatcagattgccgtgagctcgccgcgctcgaagcttctaggtgccaggagcttgcagtgaaggcgtgcagtcgctctgagtgctgcctcaatgggattgcaggcccaatcgcagtctgccacctcacttttgtgccagtcaggcacgcgcattagcgtaagcagagctgattggatgcgagcttcaacggcaactacaagtaattgagcggaaagctgcacttctggtgttagtctgcccttgcggctacggggcacttgtccgttgcccacgcctccgccccggtccgcaggtcgcgttacaacagccgcaggtcttgcactcctggacgcgccattcctctttcaatgagcgcggacactatcggcgctgaggatcgagacgaagaattcgcgtggatgaagcggatggcactcgcgacaagggcctcgttgcagtactgctcggcgacacgctgctgtctgcgagccgatgtctcgatcgaaggcgggacgtcactgccgaggatggagagcaactcggcggagcgagcccatacgaccgcgtcgcagtattctctcgcccggagttcttgttggcgggctgtggtccggctcgttgatgcgggtgatggcgtggcttggctgttggctactggctgcgagggtatgaaaccagtgccgtgtgcgtgaggaagcccagagttgctgctagtgcttgccgcttgcgtgttgcagtgtatcagacacgatccgtttgcgtgcaccatgtttcgacacccaatgaggctgttgcagcgcgctctggcgctgtggaatcggcaaacacctcttttctcaacggcaccggcacgcccagcaacctggcacagccctggagaagtggctggtggcgccgctatactctgcctggcagcgctcacgggggccgcggaagtactgctggcatactcggttgcgtcgccgctcggtgtgcctgaactgctcgctggctggcgctcctcacttctgctctcgatacgctgccacccgccgtgccttgcgcacaaaccgtgcgcttgtgcccacttcatgcagccacccgggtgcttgcacttgtatcctccgccgtggttcctgcagaacccgttgccctgtgagcccttggtgcatccctcgaagttgcatcggctgccgcccccgtgcttcttgcatagcccccgcgattgagccgcgctgctgcagtttgagacactgcagcgcgttcctccgccgtgcgcgatgcagagatagatatccgcgctttgggcacctcgcatgcagccctccacctgacagcgcgtcccgcccccatgagccttgcacagcccgcgtgaccgcactaagctcttacagccaatcacagcgcatgacttccgcttcttgtcgttgttgccatagtcagcgccagcagaaggagtcaattcttcgctgttgtcgccgctctgacctgcgctctcgggcacttccgctgcctcattccgctcgatgttcatgtccatattgcaaataccggtaccggtccgtgaattgtgttttgcgtaaaaaaggtgcacccaaatctgcgtacaattgtgttttgtgtactcccaagtatgcgtgatttgtgtcagaaggtaccccaaatctgcgtcaattcacaattcctgacttcggcgcctggaggaccgcccccgatccagctcgcgcgccttaacttccgctgctcgccgggccatggagtccatggagagctgggtgcaggacacgttcgcgcctgtggtgctcacgtgctccacgtccgaggcggagcgcatcgcgcagaagaacaacctgtccatctccgacctgctgaacggcttcgcgcgcctggaggacgccgacacgccgctgcgctccgtgacgcacccgatccagctcgcgcgcttcaacttccgcttcctctcggccagccagttccactcgctggggctcaacgaaggcaccgagcagctcaacgccagcatcaagcgctacccgccgccgcacaacgccgcgtccgcagtggagctggacatcccgcgcgtcaccagcgtcgatgacgtccccacgtacctccgcgttgttggggctgacgccgacgcggaaggcagtaacgaccccatgccctggtaccgctccttcaagcacacgctcatggacacgttccgctgtgaagagtacagtctgctgtgccatccagtggccatgctggtggtcgtgagctccacggacccgaacccgcgccacagcttcgaggaactcacggcgcccaagaacctcccggcgccgttccagcaaggactgtacgatgccatgctcgtgcccaagttctacgtggtggtgcacgatgtgctggagacggagggcacgtctatcgacccggacgcgatcttgcgcagtatgaacattaccacggtaaatggagcggtgctgaggatcaattcgttgcccgtggaggaagcccccccgccctcgcaattcgcgacgctgtggacggagaacccgtacgtgagaccgcccctgttcccgcatgaaatggagacgttcccgcaggtgagtgatggagtgggcaccttgttgtccagagatgatgtggcacagatcaaggcgttcgttcgggatttcggactgcggttcatgctgtcctcgcttgaggggcggattttccagctgaacgaggtggtgtcggcgatgaagaagggcgtgaagaatgtgttcaagtcgtggctgcgcaagccgaaggacttgcgtccgtcaaatgctgctgcttcgggaggggttacgtacaaatgcgactcgattgagtcgcagacgcgtctgctggcggacacggcgttcctggtgagagactacgagctcgcgctgcaaatgtatcggttggttcgtgacgacttcaagtcggacaagtcggtgttccactgcgcaaacgtcaacgagatgattgcgatctgcttgcttctgacaaaggggtcgcctatgcaaatgacgaatgttctggactcggcaaatgctatctacgccaaggcgccgtctgcgttgactcagagactggctatccgcactgcggttatcgcaggtgagatctaccacgccttgagtaagtctggtttgttcacagactacatggataacgcgtctgctgctctgattcggggatcaaccatggaacagggcatctgtgccgcagttctcatggagcgtgcagctctctgtgaccttcgagcacgacagccaaaattccgcaagtacggtttccgaatggtgatggctgggcacgtgtacgattcgcttggacatgagcagcactctgccaggtgctactctttggcacgagctatctatgactgcagcggctggtttctcgtcgaagatcacatcaactttatgctggcacaacaagccaataagctggatgatcgcatggcctctattaacctctttctcaagctcatcggcactggccgcaactcggcaagtcaacaagaggcgatgctgtacgattttggtctgatggtcaaggatttcctcgcaacggattgcgctgatgcatccccgtcctcattttctcggggtggacccgttttgatcaaaaacgaagatagtagcgctaagaaacttctggtgagagacttgtgcatgcctgagctggatgacaagtcaacagttgtgttcgcgtcgaccaatgcgtttggcattgaccgttctattgacggcaatcactcggaagaggagacgtggcaagcactgggtgagcatattgacaagcagaatcgtctgcatcagtacgttacgtcggctggagcggacgaagcaaaaagttggtttgcgccttcgcacctgtatgccggatatcgcaacaagaagaacgctgcgatccaaaaacccgaaaactacgttttgggggaacagatctatgttgagtttgtgatgaagaacgcactctcgtgtgctgttgatgttgaagatatccatttgttcgggaagtttgaaatcgtgggggacgacatggagacatttgatgtgccagagaaccgagattctggcgatcagcgaattgttattgacagtgtgaaccttcagctattgccatgcagcgaggagcgggtccgtcttgcagtctgcccaaagattcgagggaaactaagtttgacgggcgtccgctggtcgatatgcggcggagacgtccagggtgaacacgcatttgatattcctggtcctctactgcaagatacaagagcacaccgagaagctagagctcgtgcgccgaacatgagtttaatcgccaatgtcgttgaatctatgccgtggcttggtgttaaagtcgaaggtgttccagctgaggcctatgttggtgagcttatcaagctgaagatttcgctggccaactcaggaaccgcagcgcttgctggcctccagatttgttgtacagatttgttgctgtgcgcatcgggaacggacagtgcaggagagctatgcgggtacattggagcgagtggtcacgttgtggatttgagtgacgtggttctcgctccgggagaaagcaaagaactgacagtctgggcacgaggatcagttcctggacgacgtcattcggccctcttattcaagtacaagtcgtcgcagacagaaggagaaactcataccaagtctctttcgcgcacagttaaaatacggctggatctggatttgctgccgtgcgtcgacgtgtcgtactccatcgagccaagcttcagcaccagtggtgaatacattctcggtattaccgtttcaaaccaacgtggcgaccaccacgagatgactggaccacaggctgacgtagtccgtttagaggaacttctgtgcgtaagcaattcgtgggcagttgagaaactaccaaggccgtcggtacagaatgccttgaatgtgcgagattcactgcatcttgggtttttcgaggcgagcaccagctacttccgcgtggttcgtcaactcgattcagagacaactgatatgtgcaagctgccgcttaactcagagcaatgcactgcagagttatccgcgactttgcctgtcgagcagtttctgtgcctcgaaaatgcaacggagctcgttcgcgtagggggcgctggagctggtgatggtagcgaaggaaagcgcggtggtggcttccgtacaattcaaagtgtgagacgtgagaacaaggcgctgaaaaatgctgctggcgaagatgttaatgaccataaaccccaacaggaaccacaaccgacgtcgaaagatgctttgctatcccattcggacacggatggacatctggtgctagtgtggtctaccgactgtagctcgtcatacagcgagaaggttgctggggtagctcctcatcgggctatcggtcagactaacttgacatcagtcaaaatccgcccacctgctcaagagaattcgtgcccgttaactgtgaccctcagctacgacgactcggttgagctgcaaggttccacgtaccctggatctacgtcagggctcaacatcgccgagctagacatcatgatgcaggtatgcaatgactcggcgcctagctcagcgccgctcgatgttactgtggagatgttgcatccagaagaagctcaagcttcactgcccagtactgccgcattgaccaagctgcactcgatttcgtactctggggcttctccacttcacggtgcgcctccgcgcttcttctggacgggagtcaccaagaagaaggtgacgcgctttgcgccaaacagccgggtcgcgatcaacttgaaggcatgcttcatggcgccgggcgtctacaatttgaaccgcttccggtttgtggtgcagtcagcagcgtccaacggccaaccacctgatgtgttcatgctccccgccgattaccttgtgtatgtgaagagcccgggagcatcgttggggtctgaagtcaagcaaacaatcagcgaactgcttgtcccggtgccgtagcatttacggcagctttcgcctcctggagatcggagcagtgagttgcttatgatgtagtaaacgcttaatcttagtgtacctgccgaacaaacgaacgaaactatactacggatacctactgggcaggtgaatgagtaggttgttcatgccgccatcaacctcttgtacttctgctcgatgaggcgaatctcctcgtcttctgagtcggacatcgagcactcaggtgtctcgctcgaaaacttgatgcgaggtacacagaaattgtggaagtctaatggtggggtcgtgaagcagccaccgtggtggtcaacgaagcctcctccaaccttgcgaaggtaagcatcaggtggcaacaaccgttcagtcagagagggattgtcgctgttgacatcggcatcgcgatcttcatcatcgtcgcggctactggcagacgccacgcttgatttgctgccatctctggttgccttcccgctcatagaaccactcaattcatcgatgaccaaatcttgcactacgggattctcctcaacctcaccaccctcgacaagctcattggatgcctctgtatcagcgcaattttcaccttgggtagttggttgaatgctgccagtcgatacctttgactgttctaatacttcagcttgagggttcgtgcattcgccacgtgcttgcaactggctgatgctagaggatggatcgagctgcttcagccgttcaccaacaagagacgacgatagagatgacaaatcggcgtcaacggagccactgctaattgacgacaaatccagtgagctcaacgaggcgtcctcatcgttgtcctcgtcttcgtctttgtcttcgtttttgttctggttttcttggtgcacacgaatagaggacttgtccgagaaagattcatcgccatttcgctgcggtaccgaggcaagagacgactgcgagttacgttggccattcccatgcctgctgaatgtgcttgagacgttagagacgtcagccaccgctccgatgctcgagctgctagcgtctgaatcatatcctgcctcgctgggaacacgatggaccacttccttgctgttgttgccccttgcttcgtcgagaaggcggcgcagttgagcaatttgctcctgcatttcatgcaattgcctctgttgattctcgaggatttgttggtgctgaattgtaagtagctgttgggttttgcagcaacttcggtagctactgtcatttttatctgaccaaccacgctggcgacgccgtgcaatgccttctgtatcgtttagggatgatagacgcgacgattcttctccagcgtgcccacacgtcgcatcatggagatcagcttcgctgggtgcgtttctagacttctcttcaacctctatgcgatcagcattgatggatgacggaagtttatccttttcctcgtcagtttgagccgatgctctactggaaacgtttagaactgggttgatatccttttggatgacgtcgcctgtgaccgtccacccactcgccatgtcttcctcttctcccttgtcactgtacgatgccatcgttcgtggtgtacacgatcgctctcctgcattattatccggaatcgtcgttttagcctcgcttgactcagagttctgggcatccgtcaaacgcggtgcagtgggaattttagcttggcgtcgagccgcttcccactcgcttgtcggcgcagacgacagagtaagctcgacatcacttgagaatttcgatacaccgaccaagcaagatcgtcggtgagagtataattccattggaagtggtcgtgcaggcggtgtcaaaaactccgagtagctgcactcaaaaaagcgaggcaaagaaccaacggcgtcactgtcttcaggatcgccggcagggtacagtgccaccaagaacgtgttctttgctggtcccacacgctctttaactgcctcagacatgaggtacccaacgcacgcgaaatacaggaacggatccgcgagttgccgccgcgctgtttcctcatcccaagcatcgtcaatctgaactccgtacacccaaacaccaacaagcggttgctgcagaacgagagggtcgactttcaacagtggcaccgccttacgagtgcgatccagggtgagataaccggatcggaggttgcccgagcgagtgctaaactcgcgtcgagctagacttgccgccagcggtgtcatctgtaacggcaaatttcggaccagtgagaacttgaacaacacgggcgacgcagcgcattcaagctggaaatccaattgcgcctcatgcggcgatgaccgaaacaccaacagtttgggctggagttttgctgccacattgtcggtgtattcatcacggtagccgctctgcaccgcagcaatcgtagcagcgtagctttccggtgaaagtccatggttacccccatctgcaatagaatgcaccgggatgcaccaagctccagcagcgcgtgcatcttccttcttcatcttcaccccctgcagcacaacctttttcaccctcggcgtcgtcgcatccccgtacaaataacacaacgcagctccatttgcgcgcgcaccacttttctcgccaaacaatctgtaaacctccttcaatgcctccgccgtcacaataaactgcggcaacacctggcccaatgacactccgatcggctccgcagacagttgacgtcgatccctgcagcaaataaacacaaaacacagcgttaaactccatctccagcttccgcatactcaacacagatacttaccacaacaccgaccgcgtcgcagggaactggatggcgtccacatggagtctcggggtctgcgccgctctctcactgcgtcgcctgccttccctagggcccgcgctcatgtgcaacggcgctctgctggtctgcggctggttggagcgactgcacgcgctcatggagagctgcgagcggcccgaggtccttgccatgggcctcgacatatcgtcgtcggtggtgtccgagaagaaggcggaggccgggaaccgacggcgcgtaggacgcgcgcgtccattgctgctgctatcgctggcgtccgcgagcgtggggagacgcgcgtggggccgcagatgccgcgcgggcgtcgcgatggtctggtcgctgtcctggagctcgtcgtcgaactgcgcgaagtgccggcgcatggtacactgggcggtttgaattctgaccaacggccgcggacaaagatttgcgcgctaagatttgaattcaaattcgcacggcagggagtggccgaaaacttcaacggaggatcaagattggacgaaattgagacccactggataataaaatagggccacgcattgttttagggacaactgcagctgcaacacaaggtctacctgcccggtatccgatacttgtcctcctaacttactgagccgcagtgacgaccaggccgatggtctcctcgccgaccttcgagattccgcaaacatcgcacagcgtgcccttgcactccgggtggtacgcggcggcgcagtacggacagcgcacatccggctcgcccaggtagatcggcgtgaagttgcgcgtgtccagcacgaagggcttcgagtcctggtagtccacggcgtgctcgttgcgggcctccttttcggccttctgcagcaccttgcgggcggtcagacgcagcttctcgtggcgcgggtgctgcgacacctccgggatctccaacaaccgccggcagaacgacgccgccgtgatgaagttgccagccttgaacgcgttcgtcatggcgatcttgagcgtgagcaccaggtgcggcagctgcagctcgcagtgcgtgaagtacgcgctcagctcgatgttgcgcttcgggttgccctccagcggcacggaagccacctcggtacggatgcggcaagccaccaggtactcgcggcagaccgtcagcaagcccttcaccttctcggcctcctccttcgagtccacagctaggaacgggatcgcgtgcaggatcgactcgcagtgcgtcttcacgtcgtcgaacttggcgccagtgaaagaacggtacgcgtgcttcagctcctccacaagagctccgaacgacacggccacggcaggctgactcgcgtcattgcgctgcagccatgcgcgcaggggcgggcagttgccctgcgtgggcaacgaagccgcaccacccgagaacacctgcatgaacacgggcttgagcggctcgaagttgatgacgccgatctggcggtgcagcaactgcatagcagtctggaacgagccggcggccacgtggtcagcagcaagggacgagttgcgaacccactgcacagcaaggctcgtgccagccgtaggagcagcaacgaacccagcatcggtgctgagaccagcgaagtcgttctccagagcggccgagtccattcccagcgacgggtcatcgattgtaagcgaatcatccaggtcgaggtcgccatccataccccaggcgtctccagcggcgtccagcgccaaatccatcgacgatttgcgcgccgggcgctcttccatcgaacgacgaccagcgtcctgctgttgcggctgcagactacgctcggcttcacgcttctcagcggcaatggcgtggtcctggatcgtcggctcgttgatctcgacgagagcccagttctcgttctcgaggcggctcacgcaaggcggcggagacagcagcgtagggttcggcagcatctcgcgcgacaggaaagcgttaacatcaaagtccgggttcgtttcctgcatcacggcacgcagacgctccacgtgttcaccgagaccgtgagtggcagccgtgagcagtgccagaccaaactgacccgcagcctccagggtcatcacgcggacctcgacatcgccaaggtaaagcgcgttgtggaagcgagccatgatgtcattgcgcacttcggcgatcttgagcatcttcttgagcttgtcgcggttgcccgtcaccaggtagaggaagctgagacgctcgaagttcttcgtgcgctggtaggccatttccacaacctggatgttgccctgacgaagggcctccacgccgagctggtaccaacacttgctgtcatccagctcgtacgccgagttcagagccacctccaggttaccgcacgaaatggccagcttgaagcgagtcttctcgtcgttgacaaagtgcaacgcaacctccgggtagcccttcttggtcaggtacgagataatagcctggccacagagtctcgagtgacgaaccatacgcatcacttccgtgtagttcttcttgttcagcgcgatcttgaactcgcactccgtcaggtccacagccatagtgcgcatcttggcctcacggtcgaggcagtagagcttagagccctccaggtgagtgaggtacacaggcacgtccagagtacggataataccagcgtcgccgttcgtaagcgagtacttaatgtggttcagcgtcgtgtacacgaagatctcggccggagcgttcgcccagataccgctcttgatgcgcaccgactcggtgatggtcgacaggtggttgagctgcttgtcggccagcacaatcgagtgcttgctcatcagcgcaacgtactcatagttggggctccataccacgtacttcacgcgcggggcctggacatcagccagcacgcggcggctctgcgtttcgtaaagcaccatcttgtcgtcgatgtgaagcagcacgcggcccacgacaccgccgaagaacaggccgtccgccgtaccattgggcggcgtgatcttcttggtgacttcgttctggaagttcttgatcacgatgtggcgcgacttgtccaggacagcgaagcggttgcgagccacgaacacggcaaagagaccaggtccacggctggactccgaagtgtcgccgcctgagccctgtgagaacgtcaccaactcgtacgagccaccctcggcgtcgctcgtcatcagcacgctgttggtgcccgagttctgctcgtacgggttgtagttgaggtggcgagggaagtttcccatgcccgtaccggcagtgcccgtgcggcggacagcagccacggggacgtcgctgccgtcatcgaacgagtacatgcgcacatagcgctccttggcgtagtaggcgcggccctcgtggatgtccatggccggacgctcacgctccagcttgaagacaatcataccggagtcgtggccggcagccagcaggttctgcgtggggtgagccgccagcatccagaagcggtcgttctcgcgacggaaggtctgcagtcccatgcgcttggagatgtcccacacacggatcgagcggtcctcactgttggaaatgatgagctcgtgacgcgggtggaagagcacgcacgagatgttgttggtgtgtccgcgcatggtgtccacctcccaggccttggtctcattcatgcgccagagcttcacctggcggtcatcggcgccggagacaatcagcggcagcgtcgggtggaagctggcccagttgacgccgcggtcgtggccttccagcacgtacttgacgatggcgtcgctcgcaccgaagatgtcgtggttgttggagcgcgacgccggggggccgaccatgtcgtccatggccgtgggggcgccgcgcaccgtcttcttgcgaaggcccgtggtgtcccagaccctgaccgtctgatccagcgacgcggacacgatgaggtcgtccttggggtggaactgcgcgcacatgacgtagtggttgtggcccgtgagaattgacacgcaggagcgcgactgccagttccagatgcggatggtctggtcgtcactgcagctgaggatccacgggtactcgtggtggaactgcaccgtgcggatgtagtccaggtggcccagcagcgtgaacaggcagcggcgcagcttgtagtcccacaccttgagcttgtagtcgtcaccgcccgacacgaacagcggctgcgtgcggtggaagtccacgccgcgcacgggtccgtcgtgctcgtcgaagcggtccagcagcgtgcccatgcggtagtcccatagctggatcacgccgttgtgcagagacgtgaggatccagggccggctcacgtggaacgccagccccttcacgcggttgctcttggactcgaacttggtcagcatggccgcaggagatgaagagagagcgcggcgcagggggcaccgacgaggatcttccttcccttgagctgcttgaatgaggagggggccgatctacgtggcggcccgcagggttgcgcacgcagcgcattggacgaaaagatggaggagttttgacgaattagaagtgggttttcagtacgcgatatcgctacatgtatcgaaatatacggggtataagagtatcacgatcgaagattatcaaggtctaaaattgagaggacggctatgtcaggatatagaaaatgagcaggtattggtgtggtgcacaccgacgattctcattggagccagcgcgcccgtccaatcattgcgtaaggagttccctccaagaacgctcattcgccgattccccagctgcaggtgcgtcagaagcacttcaagatgcctgcgacgtgtgtgcgtgtatatggctcacctgtgtgcgtgtgcgcgcagagatacagcaacaatggagtccgtcgagctgcagacgccgacgcacgtgcaggagctgcccgagtccgagcagcagcagacgcagcagcaggcccaggcgttgacggaggcgcaggccgcgcagattgcgctgtaccagaaccagcagctccagttcctccagcaacttgtacgtgcccccatcgtcatgctgcgcagagaaatatggcgcaacactaacgtccgtgtgcgtttttgactgacagcaacagcagcagccgaacaacgagcagctccgccagttgtacaacagccaaatgatgatgatgccacagttcctggtacgtgcagatcgtcttggcggttgctgtgtctcggcacactaatggatcggcttggtgatgctcgcttgcttgccttattgctccgttggttgatggtgggttacagctgaactcgcccttgttaaatgctctgacgactcagggagcgtcgacccccgcggtggcggacgccgtcgaggaggaacccgtctacgtgaacgccaagcagtaccaccgcatcatggtgcggcggcagcagcgcgccaagctcgaggccaaactgggaaaccttcgccagcgcaaggcgtacctgcaccagtcgcgacacaagcacgcaatgcggcgtccgcgtggacccggtggccgtttcctgacgcgcgccgagattgccatgctgaaggagggcacgctgcgtctggaagacctgcccgccaaggctgaaaagtagagctgatgcgcgtagggcgcgcaataatccgtaaccggccatatctcgctcccgttcccgaggcttgtatgtagtatagtgttttccattcaccttaacgttttcagcgtctcctctttcggttgttgccaagccttacaacttactaccgtggaatgacatgtagagctgctgttgccacacacgcggatcactaccgacgtagtcgcgcagcgcgcttgattcacgctgaagagccttcacatcattgtacggcagcagcagcaagtgcgtcacggtctcagcgcggacggtgaacgccactggctcatcgttcagcgactcgcgctcaccaaatgtttgaccttcgctcaagttgtatgggtgcgccgattgcacacgaaccctgccagatctttggcaacagcagaagagatgttagttcgtgctcaaagtagtgtagtgacaagcaggacaacgtacgcaatgaaataaatggctgtgggtagagatccacgtgcgctaatcacttcaccagcgcggaaaaccttggcaaatagcggcgtgttacgctcatctttcaaccgctcgatttctgcagtaaatacaaagacacattgttagacagctcgctctagcgaacaaaaccaccgcataggttgctattaccatccagaatgacgctttctgtcagccaaacaagccgagctgctgcaggagataccgccgccaaggattgccgcttgtacgagagcgatgtgacatcgattgaaggcatactatagcggtagttgatcatcattccaagcgccgatgccagcgctgatggcgtcgtatcagccatgaaattgatttgctcaacttgggcgccgttttggaggtgaaagtttgccacaggatccaggattttatcttgcttccgagcaaagaggatgtatcgggcgcaagcggctgtcatgacgtcacgaatgttttcaaccagctcgatgtccttgtgccactcgggatcgctgatctttttgagcagccatttgtgtaacactaactggttcacaccatacttcattgtgaggcgctgagcttgctccgtggtgaagaaacttcgttctggcggctccaaacgcaactcgctgtgctgcttctttttcagcacattctttgcgtccgtggtggcttgcgactgctggtcaccattagcaagagctgccttgaaccatcgggcaaaacctggcactggtgacagcgtagccgctgttgtacactgagggaacatgctggtcatgcgctgaatcgtgaggaacagtaagtggcttgcgatgtttaagcctcgaagaccagagtttgctgtcgacacggaatagaagataacgtgcgacggcttcttcacaaccggtgtctcttcctccaggataggagtgatattgttgcagaggtgatccgtcacaaccacttgcacgaacaccagcggggcatgcggcatgtgcatatggaacaggccgaagcagtagcgctgttgacccgttagacgccgctgcaggtccgcccagcctcgaatctggtgcacacgctcattcttgagcacaaatgcagccaagtcttctgaagccaagtcgattcgtcggaagcgcatgctgccctgagtggcgaacaagtcgcgcatgatcaaatctaacagctccagagcctccacgcttgacttgggtagcttctcccggtgacgttcgatcaaaatgcccaaatccactcgtaagttgagcaaaaacaacggcccaggttgaatggttccgacaagaaggaaaaactgttccgcaagcggcacaagcccccgcttaacacttttggagatattggggtcgttcttgcgactgaaacccaacgcagcggcagccacattcagcaccagaccagaacgcttgatggagggcagcgtcttcatcatcagggccaggtctcgtactcccaggtccaccgccagcgctagcacgagctccagcctttgcgcctccgtgaacttcctgtagtcggcgcacagttgcaacgcgaactctctgcgacgcttgagcccgatcacgaagccgtcgctcacgtccgcgtccaggaactcctgacgtcataaaaacaccgcgcatatatgagctctaactgcactatcattgatccaaactacatatcactgtagatccgtccacgcacctgaatctgcttggtgaactcggcgcggtcgaagtgtacggtctccacagcggtgaagccgccgtcggggctgttacgccgcacgcgctcggcatctcgatcctttaggtgcctggccacccacctgtcgtctccacagaacgccggttgcgtcgctgcaggcgtcagagccgccgccatgtgcgcctggctcgtcatgcgggtcttcgcgattcacttcaagtgcgcctgcgatctgttgacgtgtgaatttactcataccttaaccccagtgagcctggccgtaggataaaagaaaggatcaaaagtttagcgctttatacagaaacgactgctgggaaatacgagtatctgaagccacacacacaaagccttttccttcctctacaagatagtagtgtctctcattgtccatcattgcgaaattgccgcatgaaaagtgtctctaacagcttatcaaaaatccagatttattctatccgctaggaaaaatcgcatttagacttgagctgagtattggtctgaatacctctacaattttatgcttccaacggtggctttgtcaaatgcgacacgaccgataagatgggagacgcctccgatacaaacgccaagtcattttttatcctacggcggcctcgctaggataaaacggcatgtgtgtaccacatcaacaaaggatttgatcctttttcgtaggataaatttcactgggttaagtacggtttaaaagcgcacttaacgagatccaccacttcatacaaaacgcaaaagcagaggatactatcgcggccatgggcgagcgcaagggcatctacttcggcgccatcgacgccagcgccggcgacatggtgcccagcagtgtgcgcggcactagcggcggcgggcgcatggccagcaacctggaggcggccatccgcgcgggcaacgtgaacgtttcggacaacgtggagacggaggtgctgcagctgtcggagagcagtcgcgccgcccaggagaagcacgcgcagctgctgcgccgcatcgaagcggagaagcgcgcgcgcaacatcgcagtgcccaccagcgtggaggaagtgattcggcggctacggcagcttggcgagcccatcacgctgttcggagagcggccggcggaccgccgcgagcgactgcgcgagatcctgtcgcggctggagctggaagcagaggagacgggctttgtgcatcaggtgctggcggatatccagaagcaggatggcggtgctggtgcaccggcggaggggactgcagcaggggatgagggcgcggcaggtcaagcgtcgaagccgcaggaggaccaattgttctacgttcccattaaaaatgacgggctcaagactgcgcgtgctgcggtttttgctcacacgacgagcgttgtgggcgcgcggctgaagcgagagcgacaggagaagcagatgagtgcggaagagcgggcgcggacaatggatcaccatgccgcggagctctacgccacagcgctcagaatggccaacattgccagtcaaaacggcgatgtccgaccgctcgctagcgttcggtattcagctgatggagcgcatgtggctacaggctcgtggagtagcctcgtgaaggtttgggatgccaataacgctgctgaagtgaaggtattccgcggacacgaagaccgcgtaagtgcagtggcatggcatccgagtaacaccttttctgaaatgacggacggcgcagactcggtgtgtttgtgcagtggctctgcagatggcactgccaggctttggagcgcggcacgcagtgaacctttggctgtattgcgaggacacaaggcgcgactgggcaaggtagcttttcacccacttggcaactacgtgggtacaacgagtttcgatcacacatggcgactctgggacgtcgcaacagcacaagaactactgctgcaggagggccattacaaagaagtgtacgctatcgcttttcagaaagacggcgcactcgcggctactggcgacttgaacggcaatgggcgcgtgtgggatctgcgatcgggcaaggccatcttaccgctgcagggccactccaagcagattctgtcgatggactttgctgccaacggtgtgcagttggcctcgggtagtgatgaccgcagtgttcgtatctgggatctgcgccagcagaagtgctcgtacatgattccagcgcacagcaatttggtgagcgacgtgcgcttctcgcctgggtccggtgaactcctgctgagtgcgtcgtacgattcaaccattaagctgtggcgaactcgcgactggaagttgataaccacactgcgcgggcacgacggcaaggtaatgtctgccgacttcgccccggacgaaaagcacgttgtctcgtgtggtttcgaccgcacgttcaagctgtgggcgcacgagaatgaattctaagattcggtcgcctacctttccatggacaagttgctgaaactagactagcgtagatagtaacaaggtgaagaactactacttactgctcctccaaaatatgtgtatggcggatggcaacaaatgggccagccagtatcacgttggcgtatgccgatcatgaagtgtcctttcgtgaacttatttgatttttgtaagggccacttcaagtttgtcaagatctttgacaagcatggcacagtggtgcagactcctgccgcttctcctcgcagcggcgtcggtcgtcgctgatgtgagcagtgcggacactgtggtcgccaacaaatgctctctggaagcgcagcagttttcggttgtggtggcgacgagcgcgccgctcggcctgcggctgagcgacaagctggaagtgctggagtttgttgcggactctgagggtcggggtcgagcggtggaggcctctgggttggcggagatcggcgaccgcttgatcgctgtcaacgacgtgtcgctcgagggtgttgcgctgcaaaaggctgtcggagagctgcaagcggcggcgttaccgcgcaccctgcgcttccagactcacgacggtcgctgcatccaacccccgccgacggctatcaaggaaagcgttattgaagcagcaaccgcgtcggcatttacttacgatcccagcaatgaagagacctttgactacgtggtaaggattctgaagaagatatgaacataattgtagacgtggggatctaagaagcacgtgtcttgcgctgttacaggtggcaagtgtcggcgacaaaacaacggagctcaagctctacgctgtgttgtcttcagatggctcaccaccgagttgtgccttccgagagctggtattagctcgacctttcgatgggtgctccccactctcgatcaatgtcacagacaagtacgtgcttgtaccggtaagtcgtctactgccatacatgtttcgttgactgtgcactcttctaagtttgtacatgtttgttgctagagcgtattcggctgcccgatgcaccagaaggctgcaatcgcggacgaagctggagccaagggcgttgtgtttgttcagcgagtgggtgaaaaacccatgcgcgtgcgaattcctcctgcgtcgtcattgccgcatccgatcaacatcccgttggtcatggtatctacagattctggagcacgcttgctagagcaaatggttgcagttcgccccggtgaaagccaacagctacgcttcgtattcagcgcagcatgcgcagttgatcgattcgcggtgcacccaggcgagagtgatcctttgcgtcgatctgcagcgttcctcatcgaagatgcgagcgctggttttctatccatttccgtggcaacttcagcggaaacggaattggttgcggatacatacgagtttatcaagcctgcagattacagcgcaacaggaagtagtactggggtaaatctccctattggcagacacgaccttatctttccggaccctcaagcgtccaacccgtgcgagacagaccccatgcgaatctcgcaaaatgctcgcttgcgtcaagggataacgacggacactttcattgccgtcagattgcgagatcccaaaagctctcgcggatgctcgttagtgcggcagttggcattcttcgattcgattcgcccagcaggaatcattatgggcgatcaacgatttccacatgcagctagctcactagctgctgcagttgcggttcagcagacttcgattccggtcgtgttcatctccatgagcgcattccgaacaattaggtaagtatcagttgacatttcatcttgatcggtaggactgtccacaaattgtaatcgccgtgcagacgaaaattgaaagagattcaagacaatgccgaaatcaatgatggggaggacagcaacacgcacattcacgtcgagttcagcggtgaaagtaagtatccgctcatgcatctctcacattgacggcctttaattactgttgtgattttttctttccagatgcattggagcaccagtggaaggagctcgcgagtcttgcagtggaatcaaattggccgacaagcgaagctgctcgagaccgactgtttcatcgaatgctgaaggatcaaactaccttggacgaccacgacctacagctttctcttgtgaagaacgagcgctacgaggcgctagttgcagcatattggaacgcacagcgttattacaatactcgcacggacgatgggtccaagagtgaccaggaagaacgtggaagcgaacgtgaagacgaacgatagatcgactttcggaacgaacgagcagcagaagacttgcatttcaagtggtcaatgagacttcgtcgccaataggagacgttttgatcaatctgtgtcggaacaggttgttgctgtggaggctgctttatgctgctgctaattactcctcaggtttgaacgcacacatgatgtagttgatgtcggtgcaggtggggtgaatacgccaactacggaagatcggatcgcccacaatgcctgacacatccttaacggcaaaaccatccttcctcagctcagcttcaatctcacccggctgcacaaatttgttccagtcgtgcgttcctacaagttgacagatacaaacatcattaacgacgaataatttgcataataccagccgcccagtgctgccttacctggcggaacgattcgcataacgtattcagcagctccaatcgcaagcgcggcggaaagggccgtgcggttgattgacgacaggaacagtagacctcccggcttttacgtaggggggcaatatcagcaaagtaagttagctctcgcaaatagatttcagcagcaatcatcctgcacgcttacctttaccagcggcgttagcgagtgcaagaacgccgagacgtcggaaacgtgttcaatgacttccagcgaacacacgacgtcgaacttctcgccttgtgccaccaaatcatcttcaacatggcaacatgatgcaccacaaagcttagcaagcagagctctctgctagcaactaacagttgtgtcctaccagacgtgcagcggcggtagtcgatgctgctggtgtggcgactcatcgctgcatgcttcttcgctactgcgatattgtcctcgccagggtcagcagacaccatggtgccgccaatacgacacagcgcctcggacaggatgccaccgccgcagcccacgtccgccacacggagcccgcgcagcggcatggggtcgtcgtccgtcgtgtggccgaagtgcttgatcacgtgagagcggatgtacttgacgcgcacagggttgatctggtgcagcggacccacgcccgtcgtgctcttaggcgcccaccagtcactgcagcgagcggtacaatataatactaaacggttagaagtggagagagcactaactagtacgcacgtagaactgcagcgacgtacgaggaagcagcgttaaacttgcgcacttcatcgtccaccacggtagacaacgcgcgagtgctgcgcaggggcatccgcgaggagcgcaccaccttggccagcatcttgcaccgatgatctcttcgactgcagccgcatgtcttgcatcattagggccactattcgggcatcctcattgcattcgtcatctgtatttttgtatgtagggcttctactacgttcatgtgatgtgtgccacctaaagagacccacactcttcatttttcgacgcatttgcgccaggatgaacgggggcggcggcgccggggacgccgccatgcagcagaagcgcgcggcggacgcgagtgaagaggagcggatggccaagcagatgcggacggaggcaaacgccgcctcgaacctggcccaggccaacgccatggccgccacgagggccatgttcggcagcccgcagcagcagggcaacaatctcttcttcatgggctctcagcccatgatgcagtcgctccagctggctcagcagcagcccatgctgtcggtggctcccagtgtccccactacacaggagcagcacatgcagatgcagatgcagcagcgccagcagcagcaacagttcgcggcggcgatggcaggtgcgccaccggatcgctagtgcgggcgaatctcggctgggtgattggcgggttattgctgctggatgcttactgtaccttttggtttgttgtatggcagctcgacgaaacgcgcagcagcagcaacaggcagcagcgatggctacgatgatgggacaccagaatgctacgtcgatggcacagcagacgccgccgatgcaatcgaatcccggcgccaacgttcacgtggcgtcgcttatgggaagccacggaatgaatttccagttgaacacatcgaccgcagctcctgcgcagccccaacagtcgacggtgcccactggaatgcagaacccagcgcagccgcagcagcagatgcaggcaccacctgctactgttgtgccagtgacgtcaaacgagattgaagagccttgccttgtttgcggcaagaagggggacattttcacgtgcaatggtggctgcgctctccacgtacaccctgcttgcattggcgaggatgcaattttcccgtttgttggtacgctttttgtaatcgagacttgtatgctggcgtacggatcactcacgcttatcctgggttgatacgacgcgcagtcggtcaactttgtggcagttgtttcatcgtgcagcagaatagggcgtcaccggaagatctgacgaagggtggaccgaatgctctatcggtaagacttcagttcttggagaattccatgcgcgtatactaatcgctggggttgttacgtgtacctgttgtatggcaggttcgaagggcgatcttgtgtgtgaatttggagaccaatagtaatttgaacttcgacaagttcggacatttggcttcgttacgactgggagaaatcggttcggtacgcttaaggcatgcgttcgtagaaaaaattcgagagaatattcgcactcatgttcgcgctgctgtttacagatcgcaggctacccgatcaaaccatttgctgaaaagtttgtcgagccgtatttgcaggtgggtattcaacattatcgcagtaaatcacgccaacggaagtcccagtatcctggcttacaaattctcgctatgtttcctattatttacccagcgctggatacgcgaaaaacttacgaccactgacaagtggatgttgaacgtccgcgagatttttacagtgatgattggcttgtacaggtactgaaaatgtcctacgagacatatacgtctgcgatacactaaccatgcgtgtctttggtttgttcgattcgtacagtttgaagagagcctgcattgcacatggtctgcacgataaagtgattgagcttatgaaagcgcgtaaattcacggtgatggacttcttcgggtggcaccctgccatcgaaggcccaactgtgcgatgctcgagtctttgcgctgtctgtggaattcgtaacgcacccgaggtggacacatgctcgcgttgccaccacaaactcgtcttcccatcggtattcacgaagtatattagcaccctcctggctgctttttatgcaggtaagtgtcgctgtctgtggattgcgactcgtgattatgtatgtgcccgcgttctaactctttacgtcccttcgtgcagaacaagtcggaattcctcttggggcatctactctagacgtgtttgctcacacacatactgtgcggggcatgtacaagggactacgaccattcgacactgacggtgtcatctgggagcagtttacggatcagtgagtgatgtgcttctatcttctcgtattttggcggtatcagcaggaagacaccatctaaccgcgattgatttgtgcatatgctcattggataatggtgttcaggctgcggatgattttcggctttttagacatcatgagcaattttggcacgctgcagctaaacccagatctgttcgtgcccgaagtcaacatcatcttcaatccagcctatgtgaaccaagcgatgatactcaatgagtacgaggtcgtcggaaagctcctccaatgcatgaagctattcggccaggcaaaaagtaacgataacttcgccatgatcgactccgtccaacgatacttgctgttcaagcatggccccaatggaagctggtgcaagacgaatggttcgactgtggatctttataaggctacggtcacttgctcaaagtacgtgtgtgtggaatgaatgcattacttttaggcaagtactgacatgctcctgtgtaaattgttttagggcgctgcttacaccggaccttcgaggatacggccccatttcacacgatttccagcggctcctggagcaatgggctcggaatgcagcaccaaagcttccgtctgccgcgatggctggggcaaaactaccagccgaaatgtcaaagctgaagctccttgcttccggggcgactgtgaagacaaacacacaagcgaagttcaagcgccttgaggcaatgtataaggtacgatgtgagttgaaatgcatggatatgaaaggtagtatgtctgacatctttttttcgtgcacgtaatattatagcgacaaactgctccaaaaggaggtactgcctcactcgaatctttaatgaccgagaggatgaagcaacttattaaggcgaaggtacgtgcactattcgagggtctagtagaaaagaaaaatactaagttgatgtacttgattttttaacatacagaaacttgacgaccaagcaaaggctgccgcagcaactgaagaaaaaaagatcgctcaagatggagcaaattcggtcaaagaagagaaagataacatcaaggatgtggtccaccccaccgagcattcacccaatgacgaaatgccaatcaagaaagaagacggagttgcagacaacacgactgactcggaagacgtcaaatccgaaaaccagtcgtctcgggcggaaaaagatcaggatgatgacgatgttttaacaaacatgagtctccacgaagacctggaaatctttgatggtctacaatttgaggacggcggaggcatcattgacatgagcttccactcattgggcccttccacagatgttgaagaagacaacggtgaaaatgacgtagaggaccccgaaggcactgacgcacctggtcaagatgatgaggacgaagctatggacgaccatgtgtacgacgacgatgaggacgagaatgaagatagcagtcacgctgcggctggagatgcacctcatcaggaggaggtacaaatgccagacgcagccgacatcggcgatggcggttcggatttcccgtctgacatgtaaatgcgagttcacttagtaaaagcgcattctacattccttccgttagtagagaaataaggctctcacaacagcccaatgaattgacctaagtccttctctcctggtttcctatacgtgattgaggcctgggctctctgtcgactctcagccatttcctcatcactcagttcaaggaatgaccgcaggccttcccacgcagctcgggactacatgcacaacagagaaaacatatcaacatcggccagacgcataataccaaccaaactgatcggtgaaagttacctgaacgtggtaatccaagtccagatttgccagcgacaacaaagcggtcttaaggttggcagtcttcccggtgtccatccgctttgtttctaccttcagactgttcgcgatgaattggacttgttcctttgcctggttcatgcgatcctccgcctgcgtaaaatatgaagtgagcaaaggtactacatgtgaatgcggctcgcaaagatatcctgtcaacttaccgaagccattttctgctcagctcgcatggcggatgctgctgcaccactacttgctcgtgcagctgcaaaccgctctttgttgcgctgcatactcgcattcgcttgctggacctcgtgaattgccgactcgcgattatgcatcacggtctggacacacaaacacgcccggtcattatcggaagccaccccagaaaacaccaataaatccttaccttgacggcatctactttgccggcttgatatcttacaatcgacacgtacatcgatagtaacttatccagctggtacaacaaagattgcattagtatcagctccatgtatcattatggcggctacgtagttagcttacctgatcctggtaaatattggacacggtctcaaaatggtcaccagcgacctgtaaatcaacaaacagccacatcagcacgttgtattaaagtagattcacccatataattaatatagacccacctcagcgagctgcttcatgtctggatccctcttctcgtgctcggacaacgcagacaaatagctgccaaaccgtgacatctcgtacccttcactacgctgagcggcataaacgatgtccgagcagcgcgtcacctctcgaattcgcttttcatattcgtcgatatgttggccgatctgtaaagatagcaataattcgtctataagtgccacacctatttgtcgggacaagacgacatctttaacccacccttgcgtaatcatcatcggtcttgatctcaacttgctggacgttcgacgccagaaacacgccgtcttttaaggagctccatagtgagcttacagaagctggagttgggacatacgcggcagcgatggatgcaacctttaacagctctttcccagcaatgagaccctgttaccacgattcacggccgtgccaatcagtacaaaattgcaaacatggtagcaggtgaatgcaaaggcttacgaacctcagtgctagcagtcaggacgatctgcagctcgagcgtctgagaaagtttttcatggctgcacacttcattctgtgcgaaacccacaggtcacgaatgaatccaacaagccgttttgacaaaaaaaaacttacaatgaagtgctccaaagcttggcgacgttcttcgacaaatgtggcatccatgtttcctgtccagcgtttttcgggaagcggaggaatgatcgtgcctgtcgaaaaactcgttagctacacaatatttattacgttgacgcctcgtaattcagcatcaccaatcattacctcgaaagtgcataagcaatcgctggtgaagccattcgaagtcactaaaccgccgcttcacttgtgcactagtgcacgggaagtgcgagcagttcgtctacatcaaggatacaatgccaacgcagtcattcgtacacaagacgcgttagtatttgccctcagaaatctcaagttttaaagcagtcgcagcattataccttcgtggagatcacgtactgcgtgtagcgagagtagcccgacccaacaatgaccggagtgctcaccgacaccacaaaggaccgctcgaaatctggcggcacctcttctgggagctaacacaccacgcagccatcgataaaaatggttctatacaagtccacatcatatcctgcagctctcaccacattgtcgactggctgctcgagctgaaagtcggccaggggcagaggctctcctgagtagagactctgcatctggcacttgccggtgctctgcactagcgccacgagcttcatggctacgaaccagcagtccttgttcagcttctcctgggacttgcctccactagccaggcgccagatctgcgccagcaaacaccacaagagcccagtcaaataatactccctcgaccatgcccccagtctctccccgcgaacctctcggttggcgtcgttcatcagccttgcccgacggataaacgccgctccctccgtgcctccaatgtagccatctgaatccgtgtccacctgccgtagaccgaccgggaaaaaatgtaattaatgttaaggcgtcagcattcccggatatgattcagcggacggtagacagcgaagatcgacgtacgatgtggaagaacctggcgtagagcacgccctcctcgctcaggaacttgatgggtccgttcacgaacgcgatgttgaactcgccgccgcccgcgccgctcgtcgaggagcgccccatgcccagcatcgctagctggtcttcagctgcgccgttttctgaatgtaaccttgaagtacacgatccgaacacactttgacaccgacagtataatttcaaccaacccacatcgctcatcaattccattggttgattatctgaaagttatgtgacagcagaccagcaagtgtcgaagaaaaaaaaaaagcgcgaccccagttcggatttcgcgcccaaggtcacttggataattaattcctcgctatgcggacctactcgcgcgacatcacgctgggcagcgccagccaccggctcgggtcctcggccgacgtgggcttcggcggcacgcccgccaacgagcgccgcttcaacaagaagcgcagctcgcgccggcgcatgcggatctccaaagagtaaattgcgctcgatcttcaacttcatcacgtaacaatcctttcactgacgttaaaatacattttctaggtctatgaaccgtctggtgatggactatctcgtgggcaaaggctaccgagaggtggcggaggccttctggcgcgactcgggcaccagacgtgagtggattggggtgtcgttccggtgttttagcagcttgaagttgttgctgacggctgggctctctacttgtacagcgcacgtggacttgcagtcggtgcaggagcgcatgagcatccagcagctgctgctcaaggggcagatccagaaggcgcgcagcaagctggccaacatgaaccctgacttcctggagaagaacaacggcatggatttcttgctggccaagcaggagctgatcgagctgattaaggcccacaacattgaggaggctctgcagtttgccatcaagaacctcgcgccgtttggacagaagagtgtgagtgggcagagcagagaagtagcgggctgctccaatgggcccagagcgtgctgctaactttgtgtgtatgactgtcggttgaaatgcagccccaatttcttcacgagatcgaacggacgatgtccgtcattgcgttcaagaacccgtcggactcgccgcttgggcatctgctggagcaggctcaacgccgtcgcgtggcagatgaagtcaactccgccatcttgcggagccaaaagcaagagctaggtaaggaagttgacatgtgtgctgctgtctacgatgccgtactcattgagcatgtgttcttttgcagagccgatgctacccaccatggtccagcagttccattatatggaagatcagctcgagaccaagctaaaccgcccttcgcacggcattcgtgtcgaagactcagcgcgttaagtgagcgctgagaggcggcctctgctgtccaggctattctggatcagagaggctcggctgctgccattgctctcgccttttgcaatgcttctattccgtccgtcaagtgtgttattgcacatgtcttgcatattgaactctatttcttttgctgcgctcggtaaaaccgcgctgaagattaaaacacaaaataatttatcatcgctctgcatcatcgcctgagccttcttcgtaaagctgttcgatgaatagcaatcgtctggtgagtggccccgcactgtaaggaaacagatctgccgccactagcttgtcgatctccagtcgaagtcgaataagcacactcataacgcattcaagtcggttgttcgcctgcagtttttgcttgctggtcttccagtgcgcacttaaatgtcggaggtatcgcatggtgtactcgagcatttgcgtttctgaggagacaaacgtgatatcaattagatggagcggcattcaaaagaaagcacggtaatcttaccgtttgatacgaggaggtcaagtagcacgatgtggtctcgtcctagtgtgtccaccaggtcagcgaagagtaaatcggggtcatactcagtagttaagatctcgatagcgtctgatgcccaggcgattcgctgattccattgctttggcatactcacgccagcacctgctagagccgccatgcgagtaagaccgttcagcacttcaaccatcacatcatcttgctcggcaagcaccgcaaaagttcgttgtcgacttggtagcttctgttgcgtagcccaaaccggtcgttcgcctgcccgagccagcactactggctctgcactcgtcgttccagcggaaaactccagaaatgagactcccattcggctaagaagcaccaaccactgttgcaagaatgggtaccgggtcgacttccctatgaatacctcttggctcgacacatttggaggttcattgctctcgagtagctgcagcgcagtaggtgtacacgatgaatccatcagccacactaaacagcactcgaaccacttcttgtaaatcagggccatggcactttcatcaccgagttcttgatccttccaacgctttatagctgtctggaagtcgccagtaaactccagaactgcgcaagtcacgaatgccggttgcgaggcgtagtccatcgtcacaaacacgccacccataagcaccaacacctgcttgcttaactccaccagttgataaacctccttcttctccaggctgcgaagtcgtttcacaaaatcgcctaaaaacaccaaggcctcgtactgaaccgagtaaggagcagcagccgtggagctttcattcacacatcgagacgaaccaaatactctgcgtatcatagcacccacgccacataaattttccaacattgcttgcaaatacgagggctcggtcactcgttctgatagttcctcttcctcactcccgccatctctaccatcttcgcccgactctcctccagattccactttgagtagctgccgcagcacctggaaccgaaatccactggtctcctgccactcgggcgatatcgtgacaagttctctggtaattgcaacataaaagtattggttcagccctctatctgaccctaatccagattaatgagccacgcacttgacgacggcattgacacaatggctattggcgtctgcgtcgctgaccaagacgatctgaagcgcttctttcgcagcgtacgccaccaacacgtccttgcggtctagcagaccaatcagcgtcttgatctctccgccagagccgccgtggtggccttggaccgccgtggagcaggcctcgatgcaccgccgccactccatctatcgccgtttcataatatcgaccaatcacagccgcgcagatcttgaaggggcgcggatcttagagcacgtttgacaatcatgatgaacatgatggaggccccggactcggactcggacgcggagttcgcggccaagggcgccaagacgccgctctggtcgggcgcagcgtactccagtgccatcagcaagtccatgcgagccatgatgacgagcagcaggctgcgaggcgggagacacgcggcggcagcgtctggatctgctgccaaagatgcaggcgcagagctattcgctgatgctgtggcccggaaggataaggagaagatgctggacgcgctggcgaaagacccgagcgtcttgaggcgaagtgacgaggtgcggagcatcgagagtgatgagttttggatctcggggtcattgtggtctcatcattctttttttgtaaacaaaggagggctggttaccgctgcatcacgtgtgcgcgttgcgtcctaactatcgctatgtcgacctcatgaccatgatgatcaatacgtacccggaggccgttcgctgtgtcaataaagtacgctgtggcgaggtggtttcggaaggaaaccatgcattaacccgttgctctcgtgcacagaatggacgaacgccacttcatgtactgtgcggaaacacatgcgtgacggtgcaggcgcttggtgtttttgccgcttcgcttgcggagctcacactcgtgcaagacacaagtggggacttgcctctccatcatctctgtcgcaatgcaacgtgcgacattggcctgatcaagaagctggggtcggatacttctgcttatgcggcgatcaatgatgtacgacttattcgattaatggtgcagtgtgatatcgagatgacactgtttgttgttgttaatttggcgctttaggagggccaaacaccaacgcactgcttggtaatgactggccccaaactgaataagccagtgcttcatcacctcctcgagaactttccaaccacagcactgatgcgagatttggtacgcgattataggaacttgataacgaaaccctgaaaatctggtgatgtattattaacgtcctcttgtcatgtaactcactagatggggcgtactgttcttcactgggtttgcgagcgccatgaactggatctgggcgtcattcaaactgtgcttgctgcagctgccgattcggcttctctatcagatagcgtacgtatccgtcttcaagttttctggcgctctaaaccctttgcaagctaatttggatcccccgtgctatattgttttagaacggagacttgcctcttcacgttttgtgccagaacgaaaaccttacccgggaagcgctctgcatggtgctccacgcgctcccggcaggcataaatactcttgaaaaggtttgcagttccacccgaagttctgttgtatgatcatacggtcaataactttggctttcatccactgcaggatgatttgtcaccgctccacttcctctgctcgaacaagagctgcaatatcgacatgctgacagattttttctcggttgatagcgacaattcctcgtgtgccaaagctgacaaggtaacatttcaggtttaggctttgtagcaaaacgacacagtgcagtaactatattggttgactgtgttgtttttatttccagttcggagctacagctctacacttgctctgcatgaatgagtccatttccaccgaactcttgcgcacgaccctccttatgtgctgcgaagattcatttactcaagatgtggtaagctctattgcgtcactgagtcggtttgtattgtcgtgtcatctaagtgtgttgaacccattcatgtagcatggccgatcaccgcttcactatatgtgcatgaatcattcggtgtcgtctgagcttctgtggctctttttcgatcgaggccacgacctagttcgtcaagtcgacaaggtattgggcatgtgcaccagctacatgtacattcgaaagctcactaatgtaatcttttgtactgttaggacgagagaacacccttacactatctctgcagcaatattaaggtaacgccgcgcgttctagagatcctctttgacagctggccaagcgcagcgttggtcgcggatcgggtaagtagtatccgtggtgtcggatcttcgctcattgcaccaactcatttgatattctgttcggtcactgtaggattttaagcttccagtgcagtatttggtcgataacccgtcatcttcccccgaaacaactgcattgctaatatgcggaccagcgtcgtatcgccatcgatacgagttcttgagcgtgaacggacagtgcacgtgctttacacaaagttccgaggtggtatacgtgcaaacaaacgtcgccatggattccaataccgcaacaaaagttctcgtcaacttttacacgccaaaacctattgtggatcatgaacaaagcatgcttctttgcctgaaaactgcggtacgttctaactcaatgtccccaaatcgttgtcgacttgttaatattttttgtttcgcttccaggcggaaattcgagatgaccatgttaactactccccaactgtgcatgaaacgtttgaaaatgcaaaacggaggctaacgttacgcagtatcgatgtcgctccagaagaccacaacgggtaagtttacgacactgcacttcactatagccaacttatcaccgtaaaatcgatcgttttgtgctaacccatggcgccaatgtggatacgagtagtgatacgactatcacgttggactacgcattggtgatggaagctcccttgtatactctggaaggcttgagagcggagaagttgtgcgatacggaagcaactcgagcgatcgccactgaagtcgccaattgcttggttttctggcactgtgatgcacgtatggtccacgggaatatcgtacgtttgcttccgattgcatgcacagttgtaccttgtacacgtatttgagcctcattatcttttcctctcagacactgcaaaacgtgggccagtttgaagatcggggcctctgcctgttcaatttgagcaccagccgggagctatacgaccagcgtacgattggcactcatgccattccgctgagctcctgtccacccgaggcggcaaggacttttattgctaaggaagagtttttacccactctggcctctgatatgtggcagtttgggtgcctcgtgtacgtgcattcttcagtggaggtgttactcgactcaagctaattattcgatgcatctggcatgcagatatcaactactgaccggaagcactttgctggagcgattggccccttggagttattccatcggccgtgagcaaggactgcatttgatatgctccctcactgacgcagtgctcgagcctctcatcgctgaaactgcgccagaatttcgcgtattgctccagcgaactcttgtcgtgaatccaagttatcgctggggaattgatcgcttgatggtttgttgttgttcgtggatctaggttcagttggggccttgactgatatcgttgctacgtgtatgttcaacagcgcgttgaggatggctccgccttgccgtcattcgtgacaagcgaagccccctcgcatgatttcgtcggcaaaactttgcagcagaagacggaagatgcactggccgacggcaccgaacggtctcggtccgtcaaacacgcgcaagagcagctggagtttatgaagaaggagcagtcactcttgcgccacacgcttctgtcaacaaagtcgcaacttcgggacgttgaccaggtaaaatgtatgccatccagtaaactgaggaagctgcatcactcaggacttctttgtcgtctaatgacacaggcacgagccaacctgcaactgaaaatggccgagctccagactcagatgacgaccgaggttcatcatagacaggaggcgcaactggaggctcaattgctagcgcgcaaccatcaggccatgactctccagctgcacacgacagtgcaaatgctgctgaacctcgttccactcgcccgcaaggtaaaatgacgactacttgcgccgctagccttggggtggcgttctgacctctcggtctctgttgcaccttgcaggtctacggcgccgctgcggacgatttcctgtcgagtgcactagcgcagtccaccggagtcgttccactcaatgccaacccagccggcccagccagcctacgacgcaagagcagtcccataaagctcctgaagacccagctgcagcactcggtgttggcccacgggtgcgtccagaagtggaccaacagcacaccgcccagtgcattagcgacggcgttatccgacgagaactctggcagcaattagcaattctgcctcagaagacgcgcccgacgacaatgaagagaaggctcgaagccaggcagaagaatcgggcggggctgctgccgtggcttgaacagcgtggtctcgacttagctgaaagttgaagtgggtctgtaatctgaaaaaaaaaacttaaaaaacgcttttcctgtcatttttgattttgaatcggcgaatcaaaatggcgcgggcggtggcaggttcgcgcgcggtggagacgttcctgcgcaacttcgagggcgagaaggcccgctaccaggagatcctcgagatcacgctctgctacggcgtgcagtgcctcgcgcgcacgttctcgctcaagggcatcagctgcaacgagctgcggaccatcacgggtacaggagcatagaacggttagtctacagtgccaggtagtgtcactaactcgtgcttctgctattgactgcaggctatgacgcagccaagacccgggacttttacgtgcgccacgcgtcccagccaattggcagagagggggcagtgatgcagcgctcagcggtgggagtgcgtgccaagccgtcgcactcgtggagagacggagaagtggagatgccagacttcccggagccgtctgcaggggctcagagcggacctcatgctgctatagagaaggctgctgccagttcaggagcttcgagtggcgtgttgtattcgttgcctccgacatttgacgaaatcgacttccactcgaagttgctcgggaaaccgctggtggatttggcgtggaaggagttcacaagcagggaggggtcgcagatcaagacgagggaagagctggaggagaagctccttcgcatggaccagagaaagtcgccgacgacaatccctgcgactgaattgccagtagcaacttttgcagagtttctaggagcgtacgtggcagagtgtgtgcgtcaaacgcacagcacggcgcgggcaatcagtggcatgagtgtcgaggaagatggtggacagaaggagagtgcttacggccgacgaagtgcgacgtccaactcgtttaattctccagtgacaggcaggcctgcacgcagcgtttcaaccccaggtgctgcaatggggaataccagggtctcgcagcatgtggttgccgaatcggagagaaagcaacgccctctccactttcagccaaagcagcggcagcctcgacaggtcccccggtcgcttcagcatgtgcagtccagggttcagcccgacctggacgctcggcgacagaaaattctgcgagttaagaagactcagtcccagagaatggcagaaaccttagcgcgtgctcgactggctgagtatgatgcgcggcgagagttgcaggacgtgcgtgatcgacgacttggccctaagaagatgcccatcagcgatataacgaaaggtatgttgacgctgattgtgagtagctcctttcaaaagcagcaactaacatatttttatgcattcacaggtgctgcagcattggagatcgtggatgacttcatgaagagcccacttatggacaagttcggtggcgataagccacttgcgtcggcttccaaacagccgccaaagtaagtttgtcatagtgctcactttgctgcgactgtagttagtggtggttaacagtaattctgctgtgtttcatgattcagcgtctctactggcaggcgtcaagatccactgaaagaggaattgtatggcacggcggcactggataactctttccttggctgcaaacctgcaccggaaccgcgacgacaatcgaagaacgcaccaaagcaaccgaaacgccgtacgatgtacaacaggatgccaaagtctgtattcgataaagacaactcacatgttttgatatcacacagactacaacggttggctcggcgatttcggaccgatccatacaaaaactgttcgacctgagtgggatgaggacgacgctgcagagcgtaggtgtgccgacgggggaacaatcccaaaagaaatactaataatgatgcttatgaactgcaggtatcggatgcaccaagtttgagtggaactttgagcagtgagtgagcttgtttgttcagtacctggtccccctgtgaagtgatccatgactaacttatttgtgcttttaagcagtctccctggtggacatcacgagcctgctgatggtcgtgagcaacatgaaaccattcctcgggaacgctttggacaaaagaagaactactacgacgaagccagggataatagcgacaactttgttgacgacatgagcgatgcgctcagcaccaactccgaccctgtctttagatggcttaaagatgccgtttgatttttctaaagtttaacaacgccatttacgtaagaactacccgaaatgctacagcaacgttgagaagcgagtagatgaagtaatagatcatgagaagcttgccgtaccacacggggcagcgatagttgtggtgccggaaaaccagtagcgacgaaatgagggatacgaagaggaagctcagcgaaatccaagcatgcacatcaagtgccaagtcttcactgcgcccggatacgcatgcataggccatgggcagtcccaaaccaagcagaacgttgaagactggtccaccatagcacccggcaatagccatttgtggaaaccctgctcgtgccaccgacacatccgtgatgaaatcgccaactgaattcccccacgcgagtacggtcaggcccaataagctgttactcgcgtgagtgatgtatcccaccgctaccagaagcgccatcagctcattcgccacagcgtagatccaacacacacatgcaataaaagccagggagagtaacaggcttgaagcttttagagaccgtggcgcgtgtgaccggtgggtgaagaacgagagaatgccgctcacacaaccaccggcgagcgcaagggcttgccacaacggcacttgatatggtaatctaccaccgcagacgtcgaaacccgcatatccactcgtgagcgcaaccaatatcgggacagttataggggaaagacatgccttgggacgcgaccaggattcatcgtcgaacagcggcaccgtaacatccctaaagagcacaagagtcgcttgtggaatgtaaagaaccttcatcaggattggttcgttggttgagaatactcggatgacacgtctcttgagccgccatctccagcgaaggtgctgctgccattcaggattcgcgcgttcgtcatcttcgtccacatcacgctcaccatcggcaatcagtggtgacgacagcgaatcttcctcgtcgacgtcgaaatgatcatcaaacactcggctcgaaaatcttggtccgaccaattcatgcggcgaagacatctcaagctccgtggcccccactgatttcccatcactactttcacgcgattcaccgccctctttctcactaggtaccccagcttccgacctcgtgataaacgcgtaattgtgtccctgtcgcttcactctcttagcatccttgcctctcggtgacaatgcgtgccaaaacgcggaaatcatcagcgacgccttgcccgccaggtttgcatcacgaacgtcgtcttcagctgctctgtaccttgccacacacgctgggaaaaccacactgcccacgtagataccgtacatcactagaaacatcagagcagccaccgctgtatccccgacatctctctcactgctgctcaaagccagcagcagaaacagcagcagcgaggcgatcagcgcccccacatctcgcacgaaggcccagcgctgcaccttgacagcactagccacagccacgccgcctaccaccacggtggacacgaacatagctcctcccagcagctcgttgacccccgtctcccccactccggagctgtacgcagcgatggccgagaagacgtcgggagctccgttcccaaaggccaggaaggtgacgcccgccacgtcgtgaggaacccgcaggcggtcgctgagacttgccagcgtgggggaaaagtacccgtcggccgtgcttcccactggagagaaacaaagggatggataaacttagttaaaaatagggataatatcacgataactatattttttctaggagatgagatggtggagacgcacggaagtagaagagagcggcgagccacaggaacagcagggagaaggagagcagagggaggtcggagagcgagcagtagtgcatgtgcacgtagtcgatgcctagaggacccagcgtcatgttcgccacgaacgggaaggcgtcgcacgccgccggcagcggcgcgagggcgagcgccattttctccgtatcaggcaaattgaagcttgacgcgttttggaactttactatggaagttgtttatttcaacaagaaaaaagttaaatttactttatgaaatggaaagtttaccaatttttcaatggaagttcatgttcttgccgtggtgaacgcatgggttttgttctgccattcctttcctacacgagatctcacatacagcctgtgctataaggcattggaatttgcgttaccttaagtccagtatctgccatgagatccgatgcagctgctacaaaatgcttccaacttcacgtcaaaactcaacgccttgacctcgttccacgatcccgactacggcttcggcttctgtgacgccggccacgttcgcggtctctactgcggcttctctcacgctcccgcctcgatcgcgacgaatctttgtcgcgtggtgaggatcgtcctcgctccttgcgatcacggctgtggcggcgctcttcacgagcacgagcacgggtacgactgcgactgcgactgcgactgcgtttgcgcttctcacgagctggactgcggctacgtcggcgtcttgaaccggatgcaacttcctcttcctccacgagcttaaagtcgtcgttacctcgtgacttcaaccgcagattgccgcccaactcccgtcgcccactgccaccgccacttttcctttccttcgagtacgcatcgccatcacgcttgctcgtcttctcccacggacgtcgcttgaccttgttccacagcttggacaccgactgactgaagtccaccttgattcgacggtcatcgagcagcacgttgttcatcttaaagtacgcttcctcgcagtgacggcggtccatgaactccacgaacgcgaagcacagcgagtcgcccgtcttctggtctcggatcacctccgccttgcacggcccaaacctgcaaaaagccatatccagatctgcgctctccgtcacggggttcaacttgcacacaaagagcacttcctctggaggtttgacgtctgcgtccggcaggtcaccgatcatctccagcaccacggcgcgggacttggcctccttctcgcgcacggccttctcgatctcctgctcggtcctgccttcattctcgtccagcttctcgtcggccgccagtctcggctccacctgttcctgctcgggtctctctcgcgtgggggacgacggagggatgagctcctccagccctttcgggtccggcaacgggtcatccagtacgtacgtgtgcttgatacgcacgtcctggtagggccggtagtcattgtccacaaataacgagttaattgtggcaagaacgtccatgccctcggccacctcgccaaaaatggtatgctgctcgtccagatacgccatgtcctcggcgcgggtggtaatgtagaactgagacgcgttctggttggccgatcccgaggccatacctagaagcccactacgggcctcgtgggtcttccctcgagctttgggcagctcgtcctcgaagaaccgggcctgcgcgccgtagagctggccgtagatggagtccccgccccctcccgtggccgttgggtcccccgcctgcaccatgaagttctcctgcacattgaagaagaggcagccgtggtagtacttggtcttgcagagcttgaggaagttggtgcacgcccgggggcactcgtccacgtacaggtcgagcaccagcgcccccaccgtcgtctccaccagcaccgacatgttttatgatagtggttggctgaaatgaaaactgtagccatatgtggagcacaacaaaaaggtacccatactgcagtgtatccatgtgtggcgcacacgaatccatcgtagccgcatatcaaaagagcaacatgctggcgcggcgcggctgcctcaagggtgtgacttcggggcgtctgctgcgccctacggggagcctctcgcgctgtctggggacgcgtccgacgctgcactcctcctcctttctatcggcgtgttcaactccgtccattcctctgtccagcgagctgcgggagcgcgtgaagacggcgcccttggctccgacctacgacccgacggttgtagagcaaggatggcaggaacactggcagcaggcattgcgcccaagcgcacagttggagagcaaggctgcatcgccctctgataaggtcttcagcatgatcctgccgccgcccaacgtcacgggcgcgctgcaccttggccacgcgctgaccgtgaccatccaggacgccatcgcgcgctggcaccgcatgcgcggcttcgacgtacgctggctgccgggtctggaccacgcgggcatcgccacgcagagcgtcgtggagcgcaagctgctcaaggagaagggcctgtcccgccacgacctgggacgggaggccttcgtgcaacaggtgtgggcctggaacgagcagtacgggggccggatcatgagccagatcgaccatcttggagccattgtgaagaaggaccaaccgtatttcacgctggacgagcagaggtcgagggctgtggtggacgccttcgtgaagctccatgagaaggggctggtctacagacgacggcggatggtcaactggtgcccgacgttgcagactgccatttcggacattgaagtggatctggagcagctggagaagcccacgaagaagatgctgcctggaagggagaaggcggtggagtttggcgtcatgcacaggttcaaataccaaattgcggactcggattccggcgagttcttggaggtggacaccacacgaccggaaacgatttttggagatgttgctgttgccgtgcacccggaagacccaaggtacaaggagtttcatgggagattcgtggtgcacccattctccaaggaacgcatcccgattgtcacggatgatgtgttggtgaacatggagctcggcactggtacgacactcgggtttgatagctattgtttactgaagcgcctttaggtctaacggttgtgtggtgctggtttcggtgatcaggtgtggttaaggtcacgccggctcacgacccgaaggacttcgagtgcggtcgtcgccatgatttgccggaagttgaagtgatgaacaagcacggaaacctgtgcggcaacattgatgaacggtttattgggatggacaggtttgacgcgcgccaacgtgtcgtcgaggagctgcaggcaatggatctttacgttgacaaggtgcgttggaatatgccgttgctgatcacatctctttcgattgacatcagtgcattttgatactgtagctcgaccacccgactgctttatcgatctgctcacgctcaggagacgtcatcgagccgttgctaatgccgcagtggtacgtggactgcagtgccatggccaagcgcgctgcggacaacgtccgcaacggagtgatggctattgagccaaagtcacacgcacacacatggtttttcttcttggacaatatccaggactggtgcgtcagccgccagctctggtggggccaccgtatcccggcgtaccgtctgaaacctggcagcgcaagcgtgtctgaagcgagtgacaagtggtttgttgcgtcatctctcgaggaggctcgacagaaggctgaggctgaacttggatgcaaactacaagatgatgacctcgaacaagatatggacgtactcgacacatggtttagctcgggcctgcttcctctgtcggcttttgtaagttgctctagtggtctactagtcgcgagttgatctgcacaactaacatgttactccgtgctgatagggatggcccaatgcaagtaatgacgctgccgtcacgacggatctaaattctagctacccgctggatgtaatggagaccggatccgatatcctgttcttctgggttgcacgaatggccatgctctgtgaagaggttcgagtaatatctttctcaaatcgtgccgagttgatctaacgcgcaggtgtgcccacgtgatgcgatatgtttctttcctgtgcagttctccgggcgcgtaccattcgagaaggtgctgttgcaccctatggtgcgcgacaaaacaggacggaagatgtcaaaaagcctaggaaacgtcatcgacccactgcatgtaattaatggcatcagcctggagcagctacttacggacttgcaggtaagcctcaaaagtgacctaaatcagtctgttaacgtgctagatcatctgacgatgttttgttattgatcagggcggaaatgttggtccgcgcgagctgaagaaggcagagaaagagctgaagaaggaatttccgaagggcatcccaacctgtggcgctgatgcgttgcgtttcacgctggcctcgtatctgcagcaaggccggcagatcaacatggacgtgcagcgtgtcgtgtcatatcgtcacttctgcaacaaggtgtggaatgctgttcgctacgctttaccgttgctggaggcggatgcaagtgttgctgcggacgagtgcgtagacctcctgcatttgcgtgatgacatgactcttgcagaccggtggattatgagtcgattggtaagtgaaagcagtgcttgctcacgaagattcgcgcactcacagtgtcatttgtatactgtaacaggctggtgtagtgtcggaagtgaacagaggaatcgctgccaaccagcttgcgaccagtgttgctgccattcaacggttcttcgtgcaggagctgtgtgacgtctacattgaattcagcaagcctgtgctgtacggtaaccgcttagaggaaaacgttgacgtagacgagcagcatgcacggaagcgtagcgctcaagccacgttgcaccggtgtctagactactcgatgcgtctgctgcatccgtttactccgtttgtcacggaagagctgtggcagcgtatccgcgatgctgacccactagctgcgtcatcaagcgagcagggagtggagacttcaatcttgtgctctgagttcccggaagaagtccacatgagctcttgggttgatccgaatgcggaagagaggatggcggtaagtgtttgtttgctgtcgttttgattgcttcaacttcctgatttatcctattactcgcctttagcttgtcatcgatgtgattcatgggatccggtcgcttcgtcacaccgtcaaggtgctggccccgaatgcgactcctgctggtgacaagtaagctggccaatcgctctttttgttgctatatacttcttgtaacagttgtgattgtgtgtacagtgagctccctactattcacattatgtgctcgaacgcaactgtgcactccgaattgaaggatgcgcggcctgaccttgagactcagtgccgtgtgaacgtggatatcaaagctgccgctgagggttcttccttgctctcgtcttcacacgtgctgacgcactccgtgtccgactcctgtcgaggtttgttcccggctatgagcagttcttgtgagcttaatcgatatcttacctgctgtctccgtgatctgtagtgttgttagcagtgccggacgacgctgaaacgacgcagcgtgtagctagcgagatctaccggctagaaaaacgtgcctcaaagagtgcttccgctgcagaagcactcattcgccgccaacagggaccccactacgccagcaaggttcctgaatccgttcaatctcaggacgcgcagcgcctcacgcagctgcagaccgacttgcacgcagcggagaagagcctggccgctctgcgagagctccaaaaactctactaattgaatgcaatagacttgttgtgaatcaacaagggatagctacaccttattaacttcagaacggcaaattgcatgttctaaacagcaagatcaccctactgctccgcgaaggatgattttggtacggttgacaaggatggaaccaagagtccagcgcctgttccaggctccgtaacaaattcaagagaaggggtgtataatattcggggtatctggactggtcgtccggggtattcacagttctcagcggcgctaagatacctacatttaacacgcaatgcccctaacagaccgcatggtcactacggagagggtcttgaaggagcgatgatttcactctgaaaattggcgaggaatttccatagcactgtagtttactcggcttaacccgaagcccaattcccatttcctgcatgagagcacactagtcaccacgtccacacctaggtcaacggttcaacgccgactgccaacaagtgcgaggcttacgacgatcagacagctgccggctgacccgtcaacgacacggcgggtctcgggaatagagacggctgggagggagctacatggacaccttgggcttccggcaagccccaggcggctcccgccggacatgcaagtgggcgagacaacgtccgtcactgccatcgaacgaacccgacgttcggagacgttatctctcacggccagagtactgactgcactgtactctgcgcccccgtggcccctccccacggatcccgccaccctacttgatgcgtcgtcctcatatgcactgtccgtcactttcgctaccttcgttgttactcctcgtgctcctggccggccaccctcgagccgcagaaccagctagcgtaggaacctgtgcttcggcgcaacttgtgtgagcgtcggtgagtatgatcagtttggatcttgcgcgtagactcaagatcaagctcaaccgacacaaacagatcaaggtgtccggactgggtggcaaacccacctacatctctgccagcacccaaatcaagatcacgctcggtgcgagagtggtctatgtcatggatgtctgggtcgcgaatatcggtgaaggtgtggacgtattattgggtatgaactttatgttctgtgctggagttcggttatgcatccgcgagggacttctgcagctaccggatgaagagcctgttctcatgtacggagacaaggtgcagcgtcggcaagggatgaggttgccggtccaagcgccggagaccctgtacctccgacctctgtcgtgcgcattcggttcggccaagccaacccgcaacgcgaagtggtgtgggccggacgtggcgaccgatgggtgaccaagatcgtgtacggagcgaagtcctggcccgaggcggtcaaggtggtgaacatctcggagtacaacctctggataacggccggaacgacgttgacctacattgtggagtatggatttttcccatcagtggtgcgttttgtccgtccgggatcgagggcgtacaaggaatggcaggtgctgatttatgagaacactttgtcgaaacagggcaagttgcgagagcagcgtcgcctgcaagcactctgggatcgcgaaccgcccgccgtggaacctgcgaagtacacctggccgaccaaattgatgatgcatccggacggaaagaaggacgtgacgtgttccacagcggtgttacaaaatccagcagtcaagtcggacaagatcgtggaactgcctgaaggtccggtcctgcaagacctggttgaggaagaggagtcattcaaacgcctaacacctccgaccagcgaagtcgagtcagtcaacataccgggaccagccgccagtcagaacggcgatgaaatctccttcgatgataccgaatcggatgatgacgacgagttctttaacgtggtcgcacaggatgagagtgctacactggacgaagatgaagacacttttttcgacgcggtcgcaccggatgaacacgaagtgtcgggagacgaaccggatgagaccgcggaagatgtgtccgacttagcttcccagattctgtccggcactctcgtccagaagctcaagatggagtacgaacgggttatgcgactgaatgctgaagaactggactttgagcctgccgtgtacatccacgaagggagcgatctgttgtcgcagttacgggatcagctagcgcttctcccggaggtacaggatctgagccccgaatgtgacattgacaaaacagatgttggtgaacctggtgtgagcagaccggatgatgaacaccggttgcgtggcattctgaagtaccaccggcgaatcttcttaggcgacggcaatgcagcgcctgccccagctcgtggagtcgtttgcgatctggatgtgggcaatgccaagccggtcgcacagagagctcgctcggtcgcaccgcatctcgcgatgaaggtgtatgagttgctgaagaagttgctggagaccggattgatcgagacgtccacatcaccctgggcttcaccaattgtgatcatgctgaagataactgcagtcgacattcggatgtgcatcgattatcgacttgtgaatggcttcatccatacccactcccgctcatcgatgaccttctgatcggtttcgagagtgcgatgtggttcatgagcctagacatggccagtgacttctgggcgatcaggatgacggagcgagccaatctcatttcggcgttcgtgtcgcctttcggtcactaccagtggcgacgcatgtcattcggtctgaagaatgctcatttggtctaccagcagatgctcaacaattgcttgtggggttttgtccggttgccgcccgatgaggaagccgaagtggatcaggacgtactggattatctgggcttgaagccgcaagaggacaatgtcgcgctgagcggtaccaaatctgacgaggagatcctgtccggtcgacaatttcctgcattgacgaaccagatgaccgtgttccagcgcaatattccggcaccgatgcagatgggtcctgtcctcggacggagttcgtacatcgatgacatcgcgcacggggagcctacgtgggatcaactgtgtatcgacctagatgcactacttttccggttggggtactggaacatttcggtcagcctgccgaagagcgaattcggtaagcgctcgattccgtacttatcacacgagatcagtgctgaagggctctgagcgacaccgaagatcgtcaagggagtactggacctgccgttcccgtctactttgaagggcattcagtctttcttgggcagtctgaatgactaccacaagttcatcgaggatattccggtagtggccgcagtcctgtacgagctgagcgatgatcaggtgcgcgccggtcgagacttgtcaagggcgaaggaggcgttcgagattctgaagcggaagattgtgtctaccccgttgctccgacatccggaccggaccgagccgttcatcatcatcccgcacgcaaacaagtgggccgcctacgcggtcctcggacaagagcatgacggactgatccagcccgtgcgtttcacggggcgcgtgctgaatgaatcagagattcggtaccacgtcgcggagaaggaagtcattgcggtcatgagagtggtggatgtgttcaggacgatcctggaggggtgtccgttgattgtatacacccgttattcggtactcaagtgggtgatccagtccaaatctgcggatggacgctgtgtgccgtggggcgtcgcgttatctcagtgggatctggaggttcgccgtatccagcgagacgaagacggtctggctgctatacttggtgcgggtattaccccctgggagcatctggaccggattgcggagtcgctgatcccagccaaggggcgcgtcaagccgccgccggttatcagtgtggaaatgctggacgccaactttgaagggatcgtgctaagtttcgacggagccgcgaagacatcgacacgtcaagggagctgcggatgcattctgtggagcctacccggttgggacgtactggaggcacaaggcttcattctgaacgatgtcacggtaaacgacgcggagtatcacggcttattgaatgggttgacaatggcacttgaccgtgggataacggacctgattgtggttggagactctcgcatcgtgatacagcaggcccaagggctgatcaattgcaaccagcccaacctgcaacgacacttgacccaatgcaaaactctggaggggcgattcagtacgttgcgactggttcacgctaagcgtatgtacaactcaaccgcggattgcctaacctccaagacactagcgcttggcgccacgtggaccgtacaggataaagaggagcgaacccacttgcagcgagtgtcaaagatccacgagaagctgatgaaaccggtagttgtgacaccggatgtagccgaagctggtcaagacgtaccgaatggagatgcgaccgaggcagcagcgacaccggatgaggtgacaccggacagtgccgaacaggatcctgagtcagcaccactgcacaactgtgcccgagtcatggcggtcttaacccggtcgagaacccaggagcagactgaatccagcgagccattgggtccgctggagttccaagccgaacggtggcgccgaattaaggcgcaccaggaccaggatgagttcatcgcagaagtgaaagcgtatctgagtggagacctggagcgatactctcccaggcgactgcggaagatcgcgaagctctctgacctgtttgcgctggacgccaggggcgttctgtaccgactcgcgcgttccacacgggaccgacctcgggacgtacaggatgagcctcgcctggtggtgccccagactctgtatgccgacctgctgcactacgctcacgaggatttccaaggtggacaccaaggcatcacgcgcacacacgaacgactccggaccgagttctattggcccggtatgtacgccgacgtcgaacgttttgtgaaggagtgtgtcgattgtgcaagcggaaaggggcgacctcccaatcctggaccgtcgcctggtaacatcgagcctcggcgtccacttgaagtggtgtctatggatttcgtgacgcatatgcccatgtcagcacggggaaacactttcctgttgttgttccactttcctgttgttgttacactttcctgttgttgttccagattcattctcgggctatgtgatgtgtaaacccatgtcgtctacgacggcacaggatgtggctgaggcataccaagagcgagtctttcggaatttcggtgcgtcgtcgatgatcagacacgatcaggatcctcgcttcatgagtgaggtgttcactcgcttccgggagctgttggatagccgtcaacgcgcgaccctggcctatcgccctcaggcgaacggccaacaggagcggtctgtccagaccgccattcggagcgtccgcgcctacattgccgaagcagaccaatctgactgggatgaccatgcagaacgactgatgttcgcactgaatacctccttcgacgcgaccagactggataccccattctatctggtgcacggttgggacgcacaaggaacggtgtcggcgatgctagggccgaaaccatccagtgtgcctgagcgtacaacatacgagtggcgtcgaaagtttcagcgcgactacagctatgcgatcgcatgtgccgaagatcttcagaagcaggcgaagcggacacgatctgaggagcagacacgaaagtggaaagaactctccgaacgattgaaggccggattcgagaagggagattcggtatgactttacatccccaaggtccagacaggattgagccgcaagttggctcacatgtggcacgggccgttcaggatcgacgaggttcatgacgacttccgcgtgaagctcaaggttgaggacacaggataccgcgtcaacccgtgggtacacatcagtcgccttaaacctcgagcgctgttcccgaaacgatctaccgtggagctcgaactggatgacgacgacgatttcgatgcggcgttgttgcctgaggacagctgggagccggacgagtgatgaacatggagtatgtggaactatgtagttagcagatggcgacgccaaatgcgcgactagttttggtgcttgacagagacccagttgccgcgcagctcgtttggaggcaggagcatgtctcggatctcatgaggacgagcagcgacgaggtcgttggtggaccatccccggtccactggaagcgggcgggttccgcgcggtccagaattgccaactgctccatcattgtgtatggctcggtgccgaggtttgtctccgaccggtcgaacaggatccagtgacagagcttggcggggtacacccaaatgcctgattcgtacaggatggtcttgggcgatccagacgctttcagcttggcgatcaacttgttgtagtccttgatggccgcgtcatgacgtttcttgcgtgccacttgggacctggcggcctccacgctgtccgcatcgaatgtgacccagtgacctgcgtgccagaaagtcagcgcgtcctccttcatgtaggccacgacctcggacagaacctcgagatagctatccggtagcgcgctgcgcttgtgaaacagaaggggcacgacgcgtcgacggaacatgcgccctccgggattgctatccagaatgacctcgtactcgtcgggtcggaaccgcgccttcagaggtttcgaaccaccattgtggtttggtgcgtaatcggggaacccgggagactggttgacagcgttgaccgtactgggtgcgaacgtagtcaggatccccttgtgaccccaagacgtgacgctcggacccggcttctcgatcaccatcaattcttccggtgtgaggtcgcccatgtccgtgcgggccaggggcgacttcttgcggtcatcgctcggtcgggccttcctccttttcttggccgagggtgcactagacaccgaatccgactgtgacgacatcgaactggtacgacgcttggacctgcgaagaggcgacaccggatctggagtgcttgacgaatcccgtaacagcaccggcagcgcacgtagctcatcctctctggcctcggcccgagcgatcttggctttctcttccgcactgggttcccacgtggcgtcacgactctcgctgtcgccctcgtcgtcatccggtccgagaagcaagtcgctttcgtcttgagtgtggtcgatcaggcccagccagtattccggtgtctcttcgttatcggcccaccgttccagtatcgcctctgcgtgcaggtagtagatctacgggacgtacgtcgtccagtacgtggagtccaagcggatccagaacatcatccggaccaacatgcaggacaacccgaacgggaaaaacatgttgtgagccatggtatcctggtccagcagtttcatggcagcgtgatacgtcaatccggtgcgcatgaccaactggacgtcggtgcggagtttgcgccacacgatcgggaggttggccaaggaggcgcacgcagtcttctcgtcaatcaggtactccttgccgaccgggcgagcaacgtcacttgatgcatcccatgcaatagggcgccactgcacctggtccggcacctcatgttgacgcttggctgtaccggatgatggttgtgcagaagcctgctccttcggtctggagtcaccggtgagatccagaatggagacgcgcctgccacttgatttggcacccccacttggtccggagtcgccattcggtccggactcgtcgccgttgtctttttctacggtgtcggcctcgtgacgaaagctgaacggaccgggctccgcgaacatgtcgtcagccgaagtgacgttgatcagtgtctgccattcggacggcggagtcgtaccaagcttgtggcgcttgaacagctcctccagacgacgccagtttccggtccctttggtctggttgcggttcaggaagttcatcattcggtccacatcgaaggcgtgagacgcgagagactcgacacactcgttggacgtaccgagcttggcctccagagctgagatttggtcccgcagagactgcttctcgttttcgagctcggtcatcaacttcttgaagtccgcccggtaacgctctgtggttctctccttctcctctttgaggtggtccgtgatgacctgccactgcccgaccaactgacccaacgcgatctggagctgtgtgttctccttctgagcggcgaacagcatgtcagccgtaccggatccctgcgtctcaacttggtgccgcatgaatcggtacttgacgagcatacgccgcatgatggtggtcataccgaatacccgtgcagccaagtcacgacactcgtagacggacagaatggatgccatctcgcgacgcgcagagagagaattgagcagggtctctaattcggtcgggttgggcgaactggccaggggacgaacgaagaactcgttgacgtcttcacgctcgccgaccagctcattcagttcggccaggtccgtagcagtgagcccctcgatcgacgtcagcacttcctgtccgccatacccgtcgcggacaaagcggttgccgccgatgtgttccagacgcgcggggacgctgaccatacagaattgaccatacagaatgcgccgtccggcttgtactcaggaggtgggtcccacacggccggcgaccggttgtctgctggcgcaccgaagttggtcgctgccggatggcctgcacctgcaggcatggcgagggcctcctgcgcggacaggatgcgcccggagatgctgcgctgcttgcggagcacgcgctcggcgaacccatgaccttcttgaatcactggagactgccggccaccttcattgtcctcgctctcgaagttggcgcccttgttgtcgccctcggcgcgcctgatcgtcgtggcaccgctgctcatcctctcggtggagttgcagcgttgattgacgccgtcgctggacgcacgcttgtcgccggagccgccggcgcttccatccgagcccaagttggcacccgcgtcactgcctctccgtggaggagctagcggaagttgtgccgggctcgctggcttgctaccaggcgtctcggccgtgtcgttcgcttcgcccatggcactgatgagtcgctcgatggagaatggattgtgttttgaggcagactgcttctgccagttggattgtgatgtgcggagacccgcacggagatgggacgttggatgacatgcgttctcggaaatactctctcaacggttttgcgaatcggtacgaccctccattcggagtgggagccattgtatatgggtctggtcatgtcctgtcacctcggtggcaagatcctctgtgaaagaacctgagcagaggggcggttgacacgatgtgaaaacagatttttgtctgcacccatgtccgaccccatggatacgtggacccttcggtgagatgtgattggtcgcatgagatggagatccggtggagacgagtgtgacgtgtggattgtggatgtgtgtggagatttggtggaacccggcacttgcagcaagcatgggctcacaggattggagatgcgctcaccggatgagcgctcatattcggtgcggagtcacgcatcctgtccgtccgccgacttccctaactgcaggataggcccaaggcgcgaaagtgtggccagcgaacgtatcctggccactgcctgcattggctcagtcaagttgtcggaccaccccactgaatcgccccaccagacatgatcacacgcacacaagaccatgttggatgaagccttgtgttgtcgggaccggatcgtggtgtacccggtgatggcgtaccgaatggagaagtgccacaccggatggggacggaccggatcgtttcattcggtccggcccccgtgcccacactggatgtcgacccaccaagaacaagtccagtgtgcgccgcgtgggttcgcacagcggcgtcgaaccagatctgatgtgaccaagatcccccacgatcaacgggcggcaccgaatgagccgcacatccaagggagaggtccagttccaagacgaagagacagtgtacccaggtacctctgtcatcatctgatgagtgtacccgaagaagtctcgccgtcaacaagtcttcacataccgaaaccaagacaaacatgctgaagaactgccaagaagcacacgcatactcaagacaagcgaagcatagtgaaacctacattaaagtcagcgaagtgatagaagatagctagccaaacgtaagatgtaaacagaaaccaatttgccgaagaacacgcggacgaatctgtgctcggggcagaagtagcaccccgactttgacgtcttcaagagcgctccaggagactgcctgcgcgaggtctaagccagtttagggacgcttccaaggcctcactggtgtagcgagcactggtgtagttgggactcaaaggtaccaaggcaaagtcggcagtgactggggtttcgcgccccggagtgacctgtgagagctttattttctatttgcgtgctctaaccgggcattcatttcatattccctactgtgtatctttggtggttgaggtagtcacccccccagaccgaattgattgactactgtgtgataggactgaattatattttgtattgttccctcattctgtgagggtggtgcgcgtaagtgagtgtgcatccagggctggccagtgccttgggtgacggctccgaagttgactggtgtatagacccccccacccaagggtctcaaagaataagtggtgtaatgggcctactttggcccactactttagcttacacgtgtgcgcgtgtatgtgaggaagcgtagcttagtttaaattagagttaattatactcgggtctccgagtataaattaatctaaataaacgaaccaaataatgtttttgggttaaaatgagaactgctatttttgttttatgtttctgacttcctctaaatgtaatattctaaactaggaatctgccaacggctggttggcagaattccaatgctatgcatgtcgctcattggctaaaagatgctgctttcagccaataggaatcctaagtctctatggaccacccgtcgtggtgatcctaaatgtatgtagcctttggtgtgtctacaccaaggtcgagaaagtctttcaaacctctaacagacgtcgtgtctgttagagttacaagtgactgtagccacttgtgcgtgtaaccctgttacaccatcccccctcaaggttagatgcgccgagtcacggcacgtcaataaggaaattgaccattcgtcaattcttcacgttgggagaaagaaaactcgagctcattccgcaatgagctcgcctcagaagaagaccgacgctgcagcagaggggaagtcctccgccgggatagagactctctctatccccgagtaccgcgagcgtcttaaagcaaagcgtgacgctcttgctaccaaggctgcggcggggacaactcaaccagagattgtcctcgaaggttcttctgtagtcaacgacgccgttgacttcgaggacgacgacgtggagatggaagagggcgaggcctcttctagcaagcgcaaggagtctatcgacagcgatagtctcgacccgcatgccgggtcgaaacgccctcgtgaaggagacgactcggacgcttcgagctcgaagcgttcgcgcggcgagagcgacactccgctctctgctgctggggctttgagctccccgcattaggtggcgccttcaagctctccgcgcgctactcaggcagcgcgcgatccgtggatgccgtctgcgtcagagatcgcagaccgtgtgggcaacactgtgcctccaaacgaaatcccgctgtacgtatgcagcggtatccacgacgatgctgttgcggaggagcagcactgtgatccgttaacgaatcaaaggcgcgactactacatcgggctcttccacgagcttcggaacttctccagcaagaagacctcttctcgcagcaaagtgcctgagtggcaggcactttgtcaaagttggaatgcttttgttgagaacttcaacaagaaaccggctgcttaccgcgagcgggtttagtatgcccgtgagcgcttcgagacattctcgacgcgcgggcggctggagcagctccacatatcctctgtggacgttggtattccatgcgctgtgcccgaaggccaacagtgcacgttgtgtcttccgggtgcggcgcgcttgagcgaccgcgacctaaacgggtacacgacgattcgtgtaccggcgagtctcagggatctccgtgccaagtccttggcacgcgagaaacgcgatgatcgcgaaacttcgggcgctgcaggtaattacagcgctcgcgctacattcgcgccgctagtgcgtggtgagcttcgtacgccctcaccatttctggaacgtcctgcagccggacgtcccgtgactcccatgtatcttggtggggcggaaaccctctcaaacgaatacgataacgaaccggctgccggttcgttttcgggatactatggttcacaatacgctcaacaatccagcgtgttgagccgcgggcgtcgtggatcggaggcggcggtggtgggaacacgccccgggtatggtcaacctggggttgaccttggtccgacgctcgaggagcggatcgctgctgcggaacagcatcagagccgggagttcgccgctctgaagcagaaggtggcgatcctgagggctcaagtcgctcaggcctcgcagaccgcgtcggacatctctgtcgacttgggaggtcgcgtcgcacgcttggcccagcgcgttcacgcgctggagtagaggttcgctcccgctggggcttctgcttcgggccagccgagctaggtggctcgtgctgccggtatggcttcagccgcccgacgtaaaaggtcggttggaggcgcatgctagatggaatatctagcgtgtaggcgttgccatgccgtgccaacaccgtgaacggctcgatgaagcgcggagcgagcttgctcgccccgaagtcggaaactgcatgtttaggcaggttttgagtagctaacaaaaccaatgaacccttcttgaattcattagtgttgcccctaccaacattgtctgcgttcagcttctgtcggtcgacagaagctgcgatagcgtcttggacaaaccgaatgacggcttgtctgcgctgcacgaagttgattgcgtccgagctgaactcgttcagctcgtttctagcagtaggcccggcctctgcgttcgtcttcgcggtgtctgttccctgcacagacccgttcttcttcttcttcttcttgctcttgtcggcgtctgtgtcctgcacagacgcgtgcttcttgttcttctttcgcgtagtcgcggctgacactgtgcaagtgtcagcggcattctgcggctgctgtgttgcagtcgtagatcctcccccacttaaggaaggagccaccatcccgagtagactcgggaggcgtgggtgcctgatggcattcacgtagaacggtgtatgcccgatcgaggcatgcaccgagttgttgatggcgaactccaccatcggcaggcactcgctccagtgttggaacgagtgagcgtagttcttaagcacgtctacgagcacgcggttcacgcgctcggtttgcccgtccgtcggcggatgatccgcagtcgacatcgaaaattgactcccaagaagtgtaaacacttcttgccaaaggtgtgcagtgaagcgcgggtctcgatccgacacaatgtcgatcggcatgccatggtgtttgaacaccatgtcaacgaacagacgtgtggtctgtttcgtagtcacttcagcgggtaccgcagcaagatgtaccatcttgctgaagcggtcaacaaagaccacaacgcccgtgttcccctggctgtccgggggaagaccgaacacgaagtccaaagacatggactgccaacactcccgtggagttggtaatgactgcaagggagcctgcgcgaaaggcgcaggcttcacacgttgacaaacctcgcaagcacggacgtacttgcgcacccatttatactggtgggctcagtagaagtctcgcgtgagaagaaggtatgtcttctcacggcccggatgtcccgcagtcggtgcatcgtgatactcgtacatgattctgagtcgctggtcatggtcattgggcacgacaacgcggtccgcgttgttgtcgactgcactgtagagtaataacccgccgtgcacccgataacggtgtgcacgagcccgaagatgcttcggcagcttctgacgagctttgtcagaacgcgctgagccgtaggccagcaagagcttcgcgtccgcgtcgtgcgcgaacgcgaccttcacgtcgtccaacagtgacgacgtcggggtgctcgatcgcatggcgtcaatggcattgacgtcgacatcggtcgtggcgtagtcaggcgacgcgagagcgcgtaggccaccacattgagtcttccgggtttgtactcaacccggaagttatactctgcgaagaatgagagccatctcaccatccgttgcgagatgtgcggcaacttcacagccgtccgcagcgacgcgtggtctgtgtaaaccacgaacggtttgcttccgagtagatacactcggaacttcgcgagtgcgtacttcatgggaaggagttccttgccatgtaccgggtagttgcgctcagctggcttcagctgacgcgattggtaatacacgatcacggccctcgtgatcgtgctgcatcaacacacatccgattgcaaagtcggatgcgtcacacacaacgtggaatgggcgatcttggtcggctgccgccaagatcggcgcctcagtcaagccccgcttgactgcatcgaaggcctactgacactcagcagtacaaacccactcggcgtctttcttcaggagctgtgacagtgggtgtatcatgcccgcgtagtccttcacgtacttgcacaagtatgtggccaaaccaaggaactgccgcagttccttgacgttcgacggcgtcggccactcattgatcactctgaccttctcagggtcagggcggacaccgttcttcctgacgagacacccgagcacgggtatctcgctcgccccgaagatgcacttcttcaggttcgcatagcgcttgtgcttgcgcatgagcgcaagcagcttccggagatgcaccttgtgtatctcaacattgctcatcccgtccgcagcccggctgtggacgaacacatcgccgaagtagctcggtgcgaagtcgcgcaccgagcgcaacaagtgcgttacgtacttgttgaaggtcgcaggagcgttcttcagaccctgcggcatcactagccactccgagagcatgccgctcggcgtgctcacagccgtgatagggatgtcgctctcacgcatgaggatctgatagaatccatcgcgcagatcatgagcactgtagacagtgctcctggccatcgaatcgatgatgacatcttttcgcggtagcggtgtctgcgccggtatcgtcgcatcgttcagcttgttatacgcatgaacgatgcgccagccgccctgtggcttcttgacgcagaacgtcggagcactgtgcggggatttcgattcccgcacttgtccagctttgcgacgactttcgaagaagtcgtcgatcgctttgacctgcactcgcggcagtggccactgccgcgtgacacagtacttcgtgcccggcacgagatcaatctcgtgctggattcccttgtcctgcggaagctccgcaggaatctcttccggaagtacgtccgcgtactcccgtaagatctcgtagtagggactcgtcttcaacgagtcccagctctgcttttcaaagcgctccttcttcgtcttcgcactgagagtgtcctcgctctcagtggtgctctccatgaagaactgcctcagttcttcattctcgctcttcgttctctcggcgtccgagagaatgcatatctgctcgatgcgtcaatcgtgcaagccacgtgcgaagcgcttccagctcatgactggaagcgaagtcaactccgacgcatgcgtcggagggttagcgagagtcatctccctgtaccggaacccggcactggtacgcgtcaagacgttcaacgtctcgacgtccggcttctcagcctccgtctgcccggcagacatttctggttgcgtctcggccccgggccgagacttgcgcagcgatcttcgcatgcgccgtcttcttgtccggctccgcatgactcttgacctcgtccaggcccagccgtggacgggtgttcttcttcagtaccgccggcgggttcatcccgcgggcgagcgacttcaagcccggcttggtcgcccggcgcttcatcgtgcagcccgggtgcacgacagcatgcaagtttttccggtgcgggacgtttgcaaccgtccggaccgcctgcagcgtcggctcccggagccgacacgccatcttcacatcgacgccatcttcatctcgatgcctgttattggcggagccctccattacggagggtgcgtcggctccccgagccgacgaatcaaattcgtccaagctatcgactgccggagtcgacggcgttacgtcgccttggctcttattattggccagacctgatccaatcagattcgcgtcagcctccacggctgaggcgtgtgactcgcctgcgtcatccgtgccccttgaggccggagactcttcctgattcgctgaaaagcgggtgtcgacctccgaggtcaacacatttccttcattagctgtcggcggcaacgccgacgctagcagctcttgcgcgcgtacacgcgcgcgcccagggcgctccgggacagtggcattaggcgctgtctcgagtggggagtcgcgcgcacctgtcggtgcgtgcgtagcggcaacagggccatcgctcactgttccgctgtcgcgaccgaagcgcacgagagtgcgcttctcctaatcgatgaccggatcatgccgggcaagccacggcatgcccaatacaatgtcaaacttatcgtccagatccaggacgataaaggtctcgacaaactcttgatcttcatacgtgaaacgcacgcgtaccatgcgcttctcggtcttcacgacggcacccgttgccagtcgtacttccaacatacttcgaggtatctttaagtcctcgaagtcaagccttgatagacttcgcagtcgaacaaagttcttcgacgcgccagaatctaccaaagcacggagagagctgcttgctctcatcgagttcacgttcaggatgacaaggtcaggcttgtcatcttggttcttgcagcgagaatgaatctcactgggggctgcagtcctcagtgtcgcgtgtccaaggtcgacacgcggaactgcattaccagtagggcgcccccgcgcctactggcgtccagcgttttttgtttggttgcgacggtgcccggcaccgccgcgatagccaccctgctggtgcacgggggccgtgcactcccgagcaaagtgaccgactctaccgcaacggtagcatcgcacattgtttccctgcgactgctggagtccagcagttgcagcactcgagacgtcaatgggttctgggcctcccgtcctcactaccgggcgtggctgtggcctcggcacatgtgcatgcagcttagcctgccgcaggctaaactcctcctgcattgcaagggtaattgcagctgcgaaagtactcgggtactcacggaagagataggtcttcacaggcccatctctcagtccatttatgaacgtgacgaccttggtcgcctcatcgatcggattggtcgcgatgttcgagaccaagtaccgtgctctctgagcgtaagcatgaacgtcatgcttgccctgctgcaggtcgaggaactccgccctcgaccggaactcgttttgcggtgactcaaacgcttgtctgagctcctccttgaaaccctcgtacgtgctaaagcacgtaggatccgagagtcggcgtccatatgcccaacttctagcacgtccgccaagacatgacatggcgaacgcaaccttcgacaacgggtcgatgatatgtcgagccgcaatggcagtgtcgagttcgacaagccaacggaggagaggttcaccctctcttccgacatagttactcacattgagctttagcgattgcgcgcgtggtgtcgtcccggacgacaccgcggtagtaggagcaacatcgcgttgctccttcaggatgaaacccagagcaacaccgtgttgctctgtcggcgttagcgtacgcagcatcatagctacagccgcctcaccaatgactgttgacagtcgttggagggcctcccactctggatccgacaggtggggacagtcagcgcgtgcaacgtaagttgcaggcgtagtggagctttccatgggcacctctgtatccatgggaaggttctcagttccgcgttcgtgcggtgacgtacgaactcaggtagtcggtcgttggacggactacaatgtgataccaggtgtaatgggcctactttggctaactactttagcttacacgtgtgcgcacgtgtacgaggaagcgtagcgtagtttaaattagagttaattatactcgggcctccgagtatagattaatctaaataaacgaaccaaataatgtttttgggttaaaatgagaactgctatttttgttttatgtttctgacttcctctaaatgtaatattctaaactaggaatctgccaacggctggttggcagaattccaatgctatgcatgtcgctcattggctaaaagatgctgctttcagccaataggaatcctaagtctctatggaccacccgtcgtggtgatcctaaatgtatgtagcctttggtgtgtctacaccaaggtcgagaaagtctttcaaacctctaacagacgtcgtgtctgttagagttacaagtgcctgtagccacttgtgcgtgtaaccctgttacaagtggtggctgtatattttgtgacgttcagctcggcattgtatttctgtgtgttggttattctgaattacggatctgactgtggtccctttcattcggtctgaccttctgttgattcggtgtggttcatcccaggaacacacccagcagactttattctgtatcgcaacaactcaactcggtaaaatccggtccgccaaaggtaaacgatacctataggggttgacacaaggacacacgccaaacaccggaccgcattagtgcgattcggtgcgtccaagcggttccaggcccgggtcatttagtgtcccgtgggctgcttatcgcgtggacaatctctggtactccgaacccgaattcattcggtccagcatagtgcgctatacaccctggacgataaaggcgttcacccgcctcgcctcaacgaatagacctttgtaaggcaatacacctacgtaaacgttcgattaacaattcaaacccatagtctctaacatgagcgatcggatcctgcgatactttgtaataaaactcgtgtaaatcagccgatttgtgtttttgataaaaaaaatattagatttataagacccttacacttgaaatttgtattggctcgatatctacttttctgtggaccacatatttgaagccccgaattaatccctattgggtttcttgtactatagagtagcactaccaggataatccagtaggtatgtactgagttgtcccccactgatgtgtcaatcgaatctactgagccagtaaatatttttttccagtttacatagttcatgttgcgaacttagctagtatgcaaccctggataacacagtgatattgactgtacgctgatgtgtaacggggtaagagataccgtcactagcgtatactgtagataagaggaagcttgcaataataagctcaagtcttgtctttagggtaaaatcaactctgtttatgtatgggtcggggacggagtccccctaccccttgtgaaccactcaaatctaagtctgcacctgattggatgaaatgggtctggctccccactttcaaccaatcagaacatgacagcaggtcacacgctagccgtgtgactgcacctaattttgtgtatgtacctatgtaacttctacctacgtataaatgggccctttacattggcactttacgatgccattgcggcatctccatagtggctcgattttcccgtcgccgtagtgtttgagactagttgttagatgtaggagaggtaagcgtgcctcgaaatcactactatttccaatatccgcagccgaccttcgtacaagtaaactatgcaagagtgcaacgttgattaggaatgatactgtataaagatgcagctcttggtggccacgccgcctacaaagcgtctgcaaatactgtgtgcatgcggagcagactcgagaaggctactacatgtagaccatgaaacggaaactgcacgcgctgctgctcgtgctaacacttcagatgcagaacggtcattcaattgctacatcaaaatttactagatgtaagcatccaatcgaacattacacaataacgatttagacgagtggggaatgcaggcaaagcccacattaaacgaccctcctccacttggcccgataaggactggatatcattgacaccgctttgtgccactatgcagccgctgcaacagagaaattgaccgagctaggggtggtttaactgcagcgtgctggttgtttccgcacgcgagagttaggtcgtcacagtgctgatcttcagccaaggttcgttaggccgttggtaccgaaccttccgatacccctccggcgcagtatttcccgatactacgagatcgaaacaacaagaagaacgcagcaagacgccgaggcagacaacgcagtatgcgataggtgcgcacacagagaggtatcgttgagccgcagatgtcatctcccgttctcggtgatggaggctctccgcactgctcacccgcctgtgcgccagcaggtgggcgccaccactttgtctacaaggtgcacagcgatagcttgggggaacattgatgtcggactggggatgctaacaaattattgatgtcgccagggccttgggccctccttcaagccgttcttgacctacacggcgctgtacatggaaaaatggcccttgtctgagctgccagacatgcggaaggtgcgccctcctctccaccgccctaacaaacttctactagcgtacgtctgctattttgcttgccccaaatgggtgtggggagcgctggtagagcccggtgctccgttttatgtagctcactacatcactacaatccgtcgtgctgatgtatgcgattaacgtggtttaccaattcatgacccgccagcagcacctcatgcgaaatcgtcgatgacgacaccaatattagagcagcgatgctacaacgctagcattcatacaagcagtcggtacgcttaattttgagggtcctcgcaccaatttatgagcaaatatgagcaagcaacagcgaatcaaacaaagcggaaatttatttttttatgacgcactgaccagatgttggaccgacgcgatcccatacaaaatctcatcccaaactcaaaccgcgctctcgatgatgaacagcggctcgactacaggcacttcggcgccattgttgtcacgcgcttggagtgcagctcctgcaccattgcatgtcgaaccagacgacgctgcattgcagcgatccatgtcactagatcggcttcacactcgggaggcagcaggggggcaggtccgggccgttggcgctcaatagatcgaccttcgatgcgcgcggcgactttgcgctttagtgttgacaacgacactggtgacgagtcggccacggctgcgagcttctctcctgcgtggacgcggtcgatagcttcttctagctgcttgtctgtgaaggccgtcttcatcttacgctcgactcgatatctgacgggatcagcgtaaggaaaagtgagggccaagatctggttaaaaaagtattgagccaatcagagcaatattagtccaaataagaagattggattggataatagtcgctttagtccatgaactggtcagaggtcatgaaatggtaaaccacgatactttaagaattaccccatgtcggtatgccaagggttcatctacattaactacaacagctctagcccatccattacgaccggtgcgtcagcgggaataatcaatgctacctgtattgagggattttctacgaatatgagcttcggtaaatccttgcccatttttgtataacactaatagctacgcatcaagtacgacccatctaggccctacaggcttgaccgccgtgcgcagctggtctcgttcatcacggtagcggttggtctcaggcaccaggtatgcgatccattggggagagtcagccgaaatagcgtgaatggcactccggtatgctgtattccagtgcggcgaatcactagcaagcgcgtccagtgtattacccagctatcggccgacctaatttagagtcaatcgaaggatcgggcttggaggatcacggtcggtcgtcatcatctggtgttgacaaatccacgagaatccccacatgtttcgacgttgagatgcaatgtactgtttccgattttattccgaatttattcggcgcacacgcatgcccctggggcaatttgtggaactttggcgcttccagactagcgacgactattgcaccaacaaggctattaacctttagcatgtggaccagtattgcgctacgtacatacatcgggaccaatcacgcagattgcctctgaaggcatcagcgtccacgtgtcccccgatgtcaatctatcacagcgatattgttgcgtggagaatcattcatctgcttcccggtattaaaatgtgcacatcacaaacattcgacgtgaacaagatgcctgcaggcgttttgtcgtggactctaacattctcgaaattgggactgaaatcattgttagaccgtttgggtttgttgccaaaggtgacaaggaccctaacatatctggaagaacaatacacgatctgtcctgtccaaaagcatattcggtgaacgacgcaaccgaaacggacgacaagccagctctgacatgccaaccttgcacctcggtcgtccgacaggtgctttccatagccgaagaatctaacccacttcagctgacaaccctcatggacggcgacgttgccgaggctgcccgcaaggtgggtatccacgcgggtagtgtctgtcgcataccagaagctaaagctctcgttctcgacctatttgctctgtttggatggaccttgtccccggcagaatacgatttctagggcggagcgatttcggatgtacatggttcaacactgtgaacctacaccagacaaccattgtaaacctaccattgggttgtcatgatcgtcaacaccgtaaacgcatatcccgatgtgtgcgaagaagccgagcgctcgcttcgtcacacaatgatagcaatctcgggcccgatgtctatcaacgaagaaaaaattacgggctggcaccaacgattgaaggtgttgggtcttgtgcaccgacagtctcgatgcccgagtaaaaggtcttaaaggctcggactcgagtgatacaagctctgtaatcacgatccctgacgcaaacggagtatcgctccctgcgtcacgtcgccacttgcatccgccccgccaggatattcctgcaacgactgcgtagtgctgaattcgggtcgtgccgcctacaccgagtccacatctcgtgttcgatggcgggcgatctagcatgatgggttagtatactcgactcgggaaacctcaatggcgttccgttacaaaccttcggcgactttccaccggccggtctcgatatgttcgtggatgcttcaaatcacagtctgtgcgcggccgacgtatcaagacacaagctgctcacgtacgagtttttacctggggtacgccagctgatttccaacgccttgatatcaatgtttgtgagctcgcgtctcttactttcgccgtttgcttgtggttacccgagtagaagcggccaataactttatcgccaacgcacatcggcttcatcatcgttaacatatctgctacctcgtgacaacccaagtttccaagtcgaaatcctcggacacaaacggttctcagattactagcgctgtgggaagtggagttcaacctgcgtttttcatcacgacacgtcactggacaggagaacacactaatagacctggggccccgcatctcgcaagaccgaacaactactagccgtttttattcactcacattttcttggcctgaaacacataccatagattccttgaccacgtttaaagagatctggcgcaacatctccggaacaactccgtagtgccggcaatattcgccaaataccgctgggccttagaccattttcagttccttcaaggcggtctattacatccccgttaagagacatggtattatctaagcgtcccttcacacccctcagcagcttcatttgtacgacgtggtgagtgttcatcagcgctatgatctgggtatggtgcatgattgttgtcgtgacaatgctagcatttgacgcaccatctgtttccgtgcgtgctttagccgctcgtgatgccggtcttattcattttgtagctcgttcgacatctcgcttctatcccctcgtattttcctggctcatgatatcttcgaatgagaagttgctcgctatccgcgcgtctcttcgctagccttcgtcgcagaaacgaccaccacgagtggtgtagagcaacaggatgattttacttaccttattttccatgcatgcgtcaacgaattcgggtctggttgatgcggcggagatgaaccctatgcagaccatgtagcagcataccgaacggtgcacttgtttggtcagttcaaatagagtgctttaacacgtatttcttgttctttttagacaaaacctcacagcttgaacaagccaatcactatttgaactgaaaatagcgatttcgcacttggtgaacccattacagtggaagtttaagtttttgttgaacgcccagtccgttaaaccattcatggcggaatctatttaaacaggtctaatgtaggtatggccgttttggtccgcaggaccaaaccaggatcgaaataaaattagcctccaaatgggaccaaaaagaaaacaggtttgttaactctgtaattaattatacaaatggagattaattttattatatattagtgtgaattttgtatgaacatctacactgagttctcgtttaacctgctgtcaacggttaactgccagccatgttacggataacccggcttgtatgtcgcacgactctagctaccctggcggtcgtctaacttcacgtatgcttcttgcgaccacaccgatgctcgccctccatgaacatccctgtcacaacgagttgaaattgccgggtcaccgtgagttaaagttgcccgaccgccgcgagttgaagtaaacattccatacatcgactggaaacatgttgatctatgtgcgaacgtacacccaacccgcggactacgcaagtccttcggtgtgacagcgagacataatcaactccgagacatagttggttccgtgggggggggcggacaggtacgaccacggttagcatgtccagcacgcaccctttgtgaagggaacaatcccaagccgggacatcccatcatatagaatcttcatcttgtttatcagtatgtgtgttgtacacaaacctttcacacctgcttaacatttctagcagggttaacatgaatggctccgaggagaggccccggagccgacaccggagccgacaccggagccgacaccggagccgacactaagctctatcaatcacaacttctttttctacctcttcctcatgtttcctttcttccatgtgctcaagaatctccccgcaacaggttatgagcccaacgcaagcctcgcccgccaacgaccgcgacttccctcgcctgaacggcaagaatttcgtcatctggaagacccgtgtcaccgcagctctcgacggcaagaacctcctcggcttcgtcactcaagcagactacgctggggactcggacgtcgacctcggcgaaggcgaataactcaaccaggcctgtcatccggacttccacggtgtggccaagcccgactcgccgcaagactcctcgtcaagtgtgtcctctgatgggagctcggatgattccgccggagacgacggcgatgtggacatggagaaggaaaaacctcccgtgctcctgtaattcactggccagaagaagcaggagttggaccaagctgagaagctgaaggccaagagccgacagctgagcgccaagaagctacgccacatggaagcgaaagccgatgtgttcctgatcaagaccatcgacggccaacacgtcctcatggtcaagcctacagcgtatgagatctatcagactctctgtagcaagtacgaggatgcagccatccacggcgacccgtacttcatccactcgtacctgatggcactgaactacaaggaaggaagcaacctcacttcattcgtctacggcctggaggaagcaatgacggcagccgctaattcaaccaacagcgtgctcagcgacgagcagaaatcgctctacctgtatcattctctgccgacggactggaagcccaacctagcagtctggaagggcagcaagaagtacattccgtacgccgacctcaagcgcaacatcgagaccaaggtccagaacgaacttgcgcaatcgctacgttctcaagcaggggaccccagaatcccaggagacccgtgctgaaacagccatgccagcctcagcacttgagcaagtgctcgtggcggctccacccaaggaggatacagcgctggcggcatcgctcaagtgcagctactgccatcgagacaactacgacacagtggagtgctttgtgctgcaacgccacctccaccacggacatgtcaaggccggcacggtactaccagccaattttaagctgaagccaccccaggaactgcggtcgcaacaacagcaacaccagcgacagcaaaaacgtcgcagcgccaacacccctacaagggcaactacaatggcaacagcggaaaccagtctcgcaataacaaccgcgagccacgcaatagaaaccgcaacggcaatggcaggtcccaaggacgcaacaagtaccatggacgccgcaaccgtgacgatgaggacaacagcgactacggcatcatcgccatcacgacactggacctcagccaagaaaccgaagcggtgagcctcactgctcatgagtctgaccatgatcccatgtggactgtcgactctggctgtacccgtcatgtcacctcgagctcgaagtggttcaaaacactcaagccaatggcgggaaaggccatcacggtcggtggaaaccaccaaattccaatcaagggagctggtgatgtggagctgaagatcaacgacaccaagggaaaggagcggatcattgttctcaatgacgtgctgtatgcaccggagctgacgtttaacctgctctccgtccgccaagcggttggaaatgacttcaagatcaacttccccaacgccaagaagtgcgcactgttcttcgcccaccgcatcaagtttgaagccaagactggagacggcaagtccctctaccagttccaagccaaaccaacgaactctgaggaaggagcccatgtggccgcctcaggtaagtttgacaatgttctgttatggcacaaacgaatgggccatcctaacttccgcattatgcaggatctggctaaggcgaacaccgtcacggacatgggacagtcgaacgtcgaaccaaagcaagactacttctgctcgtcctgcacttacgctaagtcccaccgtaacccattcaataaacgtaccgttgaaagggcgaaatttcctcttgaaaaattgcacactgacatggcaggacccctgccagtcccaacactctcaggatgtcaacatttcctgatcttcattgacgactacactcgttacatgttcatttacatcattaaataaaagtcagatctgtacgagtcctacgaggactttaggaagaaagcccagaacattttccgtgccgaagtgggtgaaatccactaccacgagaacctgcatgacgacgaagtcaaatagttgcaaagtgacaatgcccgagaatacgagaaactgggtcgtatcatctttaagaaatataatacccatgctcagttcactaacgcttacactccacaacaaaatggagtggcagagaggcgcatgcgcactctacttgagcgcagaatagcgttcctcattgatggcaaccggccgcaggtactgtggggggaatgcatcaaacacgttgccaacctactcaatatcgcacctagctctgtgacgcacaatatcacacctcatgaaaagtggtttaagaaacaaccatccgctcactacattaaggtgttcggctgcacggcttacgcccacttccggaactttaccgaaacaaacttgaggccagagctcgcaagtgcatgtacctgggcctcccatccaacaaaaaaggatacagactccttgacacccaagagaaccgcattatatacagcagagatgtcactttccgggaacatgaatcccctcaactggagtttctcaatccaaccaccgccccgaatgtgctcaacccgacaactgaacgggcacccattctaccaacaccacatgcgctaccaccactttctgccatgctaaaacgaactgctgacgcactcacggcggaaacaaccacgacctatttcaagaaatcgaaaatcgctgatcttgatgcagcaattgatgcaacaaagacactacttaacgataaagaggaccaggaagaacgcaaagcgcacctctcgcatatctacgcattgttggccatcaggcatatttcagaaccaaagccctattctgctgcaatgaacctgcctgaagcccgccactggaaggcggctgcccaatcggaatacaagtccttaaaagacaataacagttggattcttacagctctcccaaaaggaaggaaagcactcctctgtcgatggttgtttgtcgtcaaatacaaaggcaatggcaccatcgatcgctataaagcacgccttgtcattaaaggcttcccccaaaggcatggcattgactacgatgggatcttctcacccgtcatccgcatggaagtcttacgccttctcttgacgaccgccgcactacttgacctagaaatccaccaaatggatgtcaagacagcgtttcttaatggatatctagatgaagaaatttacatggaacaacctgaaggtttcaccgtccgaggcaaagaacatctcgtgtgcaaactgctcaagagccttgacggcctaaagcaaccaccccgcatctggtacctcacgctgtgtgcatttctcaaaaccatgaagttccgtaagctgattaaagatcagtgtgtcttcatcggagaaattgacggtcagacatgctatgtcttggtctatgtcgatgacctcctcattattgcaccgacgacttgcatcatcaaccacgttaaagacgcgctcaagaagcgctttaaaatgtatgatcttggtgaagcccagtaccttttgggttgttcgtgatcgcaaaaacagatccatcttcctccaccaagagaagtacgcaccaaagtactggaccgcttcaaccacctcgatgcacatccagtagcaactcccacggacaagagcatcaagctttgcctggatatgtgccccaaaacagactctgaaaagaacgagatgaaagcgatcccgtacagagaggcagtcggtagcttcatgtacttgatgatgggaactcgacctgacctggcatactttctgagagaagtcagccaattcctagccaaccctggtaaggccccctggaatgctgttaagagaggccttagatacctcaacggtactcgcaaactgggtattaccctcggaggaatccaaaacgtgaagccgtacaacctgcaacactatcttacggcgtattccgacgcagactatgttaactgcctagacactagacgatctgttggaggctacatcacatacatgtgtggcagcccgatctcctggcaatctagaaagcatcacacagtcgtgctctccactacggaggcagaatacatagccctgtgccactgcatgaatacataggcctgtgccactgcatgcaggaactcatatcccggaacttactgttgttggaactgaaccacaaaaggccacatgctatgctatcacaatatatgaggacaaccaaagctgaattaaactctcatacaacccagaactacatggtagaaacaagcatattcacattcgctattgttttgggcaagagaaagtagacagaaaaaaatttgaagtgaaatactgcaacaccaaagaaatgtagcagatatcttcacaaagtctctatcaaagcccacatttcttaaactaagagagtcactatgtaacctgaagacgaagaggtaaaatacaataaataccacgctcttgacaaataaccaagccaaaacttccaatactaagaatattaaacatttaacacacaaacacacgagtaatgcaatacattacgccttgagttactcgcatactaaatagcagtcaacagtatcttcataatcaaaccctataaatcaaataaaactaacccaaaagtcaacaattttcaacatcactgtcaaaacttataaaatgatttttatacaagcatatttgtactcaataagtccctacaagtcatcttacatgacaaatacacagtacaagacaaaagagacaataaaacgaccaaaacaacactaacgaaaattcattgttaacttaagagacctcgacttcttcattttctttgtcttcgcacgaggaatgtcctcaatagagtacactccatcaatgtgctcgaagtacgagctgagcttacgctcatcgttagcaaagtacatgtagttatcagactctatgaataaatgtttctttcctacgttggcacgcgcgatacaatgccaggtaccctcttgctggcctggacgacggccgatgatcagcagggctggcttccgggaccgggcgatgcgccgtgcgcggtcatcttgaccgcagttgagcttcctgtttaggtacaggagctgtttcctgcacttttcagcgccaactgcatagcgtgcgtggtgtaggcgccgtcgcgtagatgtccgtggtcctcgttggggcgctccatcttgagcttcagtaggataggcctcatcgacttggccgtcaaaaagtcccggcgctgaagagcattgttaaccgagaaaagcccacaaaaggatacccgctcgggcagggcctcttggttttggcagaggacagaggtgcgaagagaacgaggcatctaaaccataacgtatcaaaaagttagcttcaaattaaaatacaatattacgtcaaatattgcaaatcaattcagtacaacaacgaccccacacactgtgttgacattttcggtatacagcattgctgctgcaacctagctctgctgcggcgccggccagggccaacagggagcgtgcagtatgtatcatgattttcgaagagcgcacatgcgtgaaaatgcataatatgcatgtagcttaccgttgaaagttgcaggacttagaaagtttgacaatgacaggctaactgggtaaagccatcgacaaatgcagttctatctagacattgatgtggcagctacaaatgtatgcatagtgcctactgagatacttatgcgcggcagtgtaagagtgagataatgtactcgctaaccatagtcgcatacaggcaattgtaaaacgactgagactgtggagtcatatactagcgcttaaaatttgccctgtagcaacaaccgcaaaatttaatgcatggagcagcgtgagaaatgaccaaactccatgataatacattgagaagtaggaagttgtcaaggactacaaaaggacaagcctcagcaaaaggcgtcctatcagctgtcacctccagtccatattaagatgtgcatagtcatacaaagacctgtacctatgcccaaatggaagtgtgcataatcgagccgagttgaagcattccaccctatttggggtgtgccccggaaaaccgcgtctacaactttgataacggactggggtatctgtacctgtacagctcctgcggtttcttgcgtctgtcttgagccatacgtgccgacacttagcggactcgcatgcctcatcccgtcttgggactgagagtggctgtgaagggaacaatcccaagccgggacatcccatcatatagaatctacatcttgtttatcagtatgtgtgttgtacacaaacctttcacacctgcttaacatttctagcagggttaacatgaatggctccgaggagaggccccggagccgacaccggagccgacactaagctctatcaatcacaacttctatttctacctcttcctcaagtctcctttcttccacgtgctcaagaatctccccgcaacacccatcctggttggtactgctgtggtcggctacaaaacttcatcattcatcgtctggtcgcttgcttgaagtaaaaaaaacatccgatgcccctgatatgcgggaattggtcagtcgctggattgattagagcaacctcgaagtcgtagactacacttccacgttgaactcgattacccgtgcagtccttcatgaacctcatcaacgtttggtagaattgatgggttctgccagtcgtaagagtgtaaccacaaggcacgaccaagccacttgctgcgtcacctaccatcaacatgacacgctggtagaacgagcttgggacgcaacaaaaagttccatcgacgaaaatctgcgaccgacgtaactccatcagacgagaatccgcccaaccaagcacacgctgcagccactcgccctccataaacacgtgatggaggaaaagtttaaagcccccccctgcaccagacctttgtgacaccacatcgatcattccatgcacattaccaccgcaatagcagctcgccttaggtgtacttatcagcgcaatcccattgtaaccacagttaaaattaaaatcgcctgtccaataggataacgttgggattacatcaactgggttgagccaatacaacaccgttagatcttgtctctcagtactggtttaaaaattcggttccatctcatagtgttgggagtgggcagtacactgacagcgagacaaacgcagtgatcgctaactcgttatgtcaccgcggtaatgacctatttgttatagtagttcaatcagtacgaatttcatggaatggctccaccaggaagtgatagaaaaatattggtgtgtgttaaggatattaccctattacatagaccacctctgtaagcctatacttggactggcccaaactaagatttacaccgagacttttagaatccaggcttcagtacggttcactaaggccgctctcgcaccctcctgtacggtctacaccctttcaagatgtccttatatacactgctaaacgcgctatgtatagtggtcaatgctccatgtggtacaaaagtagactcggaatgttgcactagtgagtatttgaaatctttccgttggcgttcgagcgatataacagctaaagatatttcccactaagtatatgtaaccactaatgatccgaaaccactcaaatagatatgaaacttttcaaatagctacggctcttaagcctcatttgcgaaattaccaagcacaagcaccagcgccaagtatcgatgaaaaccctggcagctcgcagggctacgcagaacgtgcatatggagatgctgaacatcgtcgaccagattgtctccctcaggcagcaagaaattgatgccagatagaacatcgacaaggccaagttggaacagtaagaaagaagtagtgtggagtagggacagtaattcgcgataatcacacataatatttttactcaaacgtgttgcttgatagcgctacatctatgatacatgtgattattagtatgagcgaagaaataataaaggacgaaataaatgactctgctttttcgtgtgtgcatcataccacattgcccctgtcctaagggattttttattggtggatgttccgagctaaaataccgtagcaagccccctaattatatccccttaatcctgtttcggtttaaatagctcgctatggtatagcgtacatcggtagctagtacatagaacacataataaaagcacgataagggaagtgggcaccactggaactgtaaaaaaaaagcgatgcacttgtattgatgccgactacacccacacgaacctcgtactagactttctagcagccgctcaccaagtgaatgcagacattgatcactgctatctagcttgcaatgtcgaagagaggacgcgcaaaccaaatcatatttctaaatggaagatcacattgtctcgatatgcaggaacggcaaagaacatcttaagaacatgcgcagcattggccaaaccgcggtgttttcatttgatgctgaagacaccattgttcacgatgcacaaaaaaggccgccctgtttcctctcagatgttgcggtaataggaacgggaggtggccgctgatactcacgctgcaagatgctaaagctgcctggccaggttcgtcgcagacgtccatgcggacattatcgaacatggtactacgactgtatgcaacgcgaaccgaacaggaacggaaactctaatggtactgagcctcagccctggatcaagtatttgctctatgatgatcgtctatacaaacttggtggtcttgtaaaaagcgtttggtatcttacagaccgcgaaagcattgaatggagtttgcgccagagttaccccgcagaaagtcccgtcattcggacagctgcacaacggttaaggactaggattcgtggtctgcaccaagccagatttctggcaaaacaggccgacgagatcactttgggccgctaccggagagacgtttgggaccaggtcaacagcgctggcatggcttgttatgcgctgatttttgcacaacaacggttgtagcgatgaagggctcaacacgataaccgggtttcgcataaacgttgaagaggccacggcccgcaagatggttgtcgagggtccactccacgccgaactgcgccacactcccaaaaggatgaataacaggccataaaaaagggaatggggtggcaattaacgagaacgttttgcaagtagcaagctgtagctgcataaaccaacgtaaaaaaaatgcgtttttatttgcaaaataaggggaaagagttagttatatcaaaatacctgcacggatatctgtcgggattctaaaatctcgtatactaatatagaatacgtagcaagtgatccttgtcactgtaagctaacacatacacatttcagctacaaacaattcgggtttcaaacgtcaaatctcgaataatcaggaaataggaagcgaaaacgtgtttactatactattgggcacaatattgcggtcacctagattttggcacataatttatgttctttaccaagttggtatttgctatttagagatgtcttgtttacacgctcaaatatcattattatttgagaaacgtgaggcgttcgcattgtgaggtggcgtgcagaaaaaggtattgtggggccacatacaaactcttatctatacgcatttcaactcaattgataataggatattgtttcattatcagttagcagtgcgttgtattgtcatgcttcgagacgactccaatgcagcgacctgacatctagtccactatctttcgcaagtaggtaaggtcaaaggcctaccatgcagctagaatcgcagccgtcagctccaccactgtgccgtactctttgccattgcgctagatgatcatggttcagacgtgcttaataaggctcaagtcaagtgagcgagcaagccagtcgaggaatcggatgccttcttcttcttccaagaactttgtacaggtggatgaaagtattgtcctgctggtagatgtagtccatgtcatggatcaggcgcacaaatgggagcataactccgaaacagtacaagcatagtgctctgacgcctgccgctcgtggagcaccgctagcttcgacattccggctacattaaagctgtcccaaaacacgacagacccaccaccattttaccgacgcacactctgtcttgtcgaccgccagaaatcacgccagtgcataccatcgggaccatcgagattgaactgcttctcgtcagagaactcaatgtgatgccacatgtcggattggacgatcatgcgcttcgcccatccgagacgaacaaccttgttcggctttggtgaggggtcgggggttatccgttatggcatagttgagtcagtcgacaccggccaggaggcagcggatcatccgctcagtgcaccccagcagaagattcgcgttcaggtgtctagagctgtactccctggcggtggtcttacggcgactgcggcgaggttttccctttggaagcgagggccttctccgctcgacatagttgtgtgagcttgacttcagcgccgggttctacgcagtccctcgagcgcttcgtcttcagttagcgttacatttatttcacatcattcggcttgatgtttgtaggagtaagactggtgtggcatagtgccccgggcttccggggaccaaccgaccccggaggtgcagttcccaagaaggtgtacccatccgggtggtaccgggtgtgcccccacacaaaagagccccggggagccagcgtgggacgagtaacgatgtcagaagagctgaccccgggcgtgtccgggtcagcccatagtgaactcaagtgattagaagatgcccggaggaaacccatactcaagcatttccccaggaccagtggccctggggaagtgcgcaattcagtctaactttttccccaacgagctcaagtcgccttcgcttcatgaacgccaaggaaataaggtcacggtcactgggacccggttatccccaggtaaatcaataacatatttgccagggtttccctcgaggaaaccccaggcatttcatatttgcccccccccctccccccccccggattgcggtgtagccggcacgggtaagggcattccatattctcagggtctcgcccgtggaggctcgccccgaaaagcatggcggccgtcgccgagggagtcttgctccgaaggacctgattgcatattttagttgcgtgttaattccgcaccgggaaccaggtagcgacccgggcgattgattgtattgctaccgaaccagcgtactgataaggtcgggactcccacgagatcctcagtggttgaccttccctctgatccaaacaaccgattcgaaggagatacacaaggtgaggttactgaccgagtccaaggaccccttgctttcccacagcgagtaaaggtcccgggaactcacggccccggataaatccctcgtccgggcgggccgtctatctactaggagattcgctctctctagttccctacattcttagtctaggaacgcaacccgggaactggcggagtgccaagggcgaaagctcaaggtgctacatcccactggtcgtgccgtaaagacggatcaaataaaacactagtaaaaagtagcacccaagtcaaaaaagagagacggggcgttattatttacggtggtaaaaggatttgggctcttcccgccattgatttcctaggcgcgccaaaatgacacccgtccttgctttgatttttatcattcctactcctcgtcggtcatgcccatgcgccccaagcagaaaaacaagcacaagttgtgtgctttggccctcgcggtggggaaagttgtgtctgcagctgcctccgcgggggttcatcgctccacaatttaccgctggcgcaaagaagagaaggacagcaggaaagcagcgccgaacaagtacttcttggatcctaacaagcacgccaagacgttcgccacgagcccggaattagaagaaaggtacgtttgaacctgtatttatatattttgaaaataattatctgacggttgggttggtgcgctattgcagactccttcaatggatcacggatatgcgtaaaaatcgatatttctgtgtttcggtggagtgtctactaattatgcatgccaggtctgacgctcgccatttttctttgagatcgcgagcagcaaacatcgagtttttgcggcgcctccttaagcgcaatcgtcttaccatccgacgaatcacgcacaaagaccgcaagaaacgtttcgacatggaggtatgctacattgtttttactttctcttatctattggatttttactaagttttattttattttatagcgagttgcaggtgtgttctcccacacaatccagcacgtaatcgaggagagtgcatcgctagcttttatcgagggcgcaaagaagtacgaatcggtcttcaacatggaccagacggccatctttatcgacatgaacggtaaaaccacaatcgattttgtgggagttccaactgtggatgtagtccaaggaatttttttattttgaagggtttaaatattatgattgatcttacatttttacggtttgatctttacgttttaggtagtgaagtgaacggattccgagcttctgtcttcctcgcgtctgcgactgggcaaaaactgcccccgctgatcgtctttgctggaatcgccggcgggccggtctcgcaggcggtttggagtccatacttcggggccccagactgtgagcatacagtccagcgcaaggcataccgcagcgaagaggtcatgctcgagtggatccaacgggtacgtcaactttattgctggtgcttatgtataatattcttacatctattgttatgacatactttgacagatctggaagccgagtgtaaatggctgcaagctactgctgctggacagcctgaaagtctacaagatggaggaggactgctgcacccaagtcgagtttgtcccacctggaattactggcattgcccagccgatggacgtcgcagtgatgaagtcgttcaaagataacgtcaggtatgggtgacatcactgccattcaattatcatcctattattattgccgctaacatttgtttgtaggaagcgctaccttgcctaccacgtagagaacagctttcccgacacgccagaccaaaagcgggagctcatctcacgctttgtcgccgaagcgtggtggaatgtctcgcctgcgaccattcggaatggcttcatcaagagcggcatcatcctgataggtccgagggaccgccttgggcgtttctgcgtcgccgcagaagtagcagaagaagcgccaattttagaggaccagtaggtaaatctgaaaacgagcgagaggggttgtcacctttaatgagcactcgcgtttgattattttttattttttacgtgtgtcgcatttggtccgtgtgtctgatttgatccgtgttttacggtatattgtttccggcgcgacaatacagttcttatatgagagtcttccttcgcagagcgaacttcgcaaacttcttataataactatgcttcttagcaccaaccatctctacttagaaagtatataggtcaggtgtatatacaccggaaatgtatggaatactgtgaaccgctgtgaaaattgatacgtacatactttactatcttatcttacatgtggcaaagtttcaggagtgcatatttagttctggcgaagatatagctcactttagctagctacatcggccgctcgacgcattctcgagctcgagtggccgcaacgcctaagcaaggtatctcgatccactaacctaacccagtgtgaattatatcatcatagacttgaagtaccatgatatcagcttttgatcggcaacggcaagtgcctccacagggggcgctaacgtagcacaatgggcgtgaaagagctttaatttcataattcatgattggcatgagtaccctctgaataccgctttcaaacggcgccgttgacgcaataagttggtgccagggtgaaatctcagagatatgcgttgtatcgcgttgacgaatccattttcgagagtcatggcgtgtgcttgagcctagacaggacgatcgcgcccaccatgttgaacgcctctgcaagcatggttcacatggctttcaggtctttgacaggctctagtgttccgaggatgaggtgtgtaactttttcttgggaccttttcattctcttgctttcgttccctgccttatgagcgcggttaatggcaggtctcaccttgcttcgtatcaattcgctcagacgcgaacctctcagagatttcatcatcgcggtctccgtcaaaacctccccattttccggtgtatctcattcgtcgtcttcaacgatgtcgactcgtgggttctttcgctttgcccaacacgttaccttgggggtggagcgtgacacattgaggacggccgtcgtagccgcgctctgaccaatgaggccacattatcgagattctcatcactaccgggaatttttcaacttccagcaacgccagagttcgcagcgtattccatttcggcagcattctttagaaatactgtctatacacactcgtcaacgcccatgtcaggctgccgttcgtctgaggcttccccaagaaggttcaagcctacctcgacaacaattagtatagtggatcgtttatgagccattggtagacctctaactattgtttgtttgttttttcaactgcgacaaacccgacctcgtgtaggaacttcagcagggcttacggctattccagttcttcatgaagtacttcaacaacgggtaggaaaggtcatcaagatcaccttgaccatcgaaatcatcgaggatgtagaacatgtagcggaagcctttctgatacgccgtttcgcattctacactcattattaaatttacactagcattcaccttgtccatgtcgtcatgttcactctaggccatttccgtgcgcaagaatttctttacatggaaccaacaaagcaacaccaacaccatacttctcagaaactcccgcttcaacaatgacaattcagtgaaatgcttgtcaatcatgaaacctaaaaaatcacgaatgtttatccaagttgagttacctttttgagcactacgatagcgtctatcatgcaatcgtggctctcattttcaataaaggtgctgaacgtattgtccctaaaaacacacgaagtagaactcatgtctttgtttcgttaaatagaccgacgtgaaagtacttgtacgaccaaaaagtacgatttaccatgaaactaaacagtttgttccctgagacattgctacaagtagaatacaaatacctcaggaaagccttgaaaatctgatgcgactgcagcgtgatggtatgtatcgtcttggtaccgccaagctgtttcctttgtgaagtggagtgtcctcttggtgctgctcacgcagagatggaagcaacgacaacactcagctgggcggcaaaagccaccttgttggtcgtgtgtatattctcaactgaggcctagattcttctctttcaccttttgtcttactccaactgcaagtagtatagtggggatcagtataatccgcaacagccccacctacggattcccatcaacttgcatctccaaatcttgcccttggtaataatcccattgcagctctgtgtttttcaaatgccggacgtgccaatggctttgtaaacgcatcggccacgttatcaactcctgccacccgaagcacgtcaatttccttcatatcgatgcgctcacgcacgaagtggtggcgcacatcgatgtgcttggcccgagaatgaaacacagggttgctggcaagcttctttgcactttcgttgtcaacaaagacttgggatggctgaatttgctgcacctgcagctccttcagcatttggcgcaagtgcaccacctcctgcaccagtagactaagagccatatattcggcctcggtcgtgtgcagcgggacggtcttctccgtctggctgctccacgaaatgatgctcccacaaaattgagtcacgtagcctgcaacagactttcgatcatcaactcgatttgcaaaatccgcatctgcgtatgctctcagatgatcatccagcttttgatctgaccacgctaggccaccaagctggacccctcagtccgctgtgtctttcaggtagcgcaatccacgttttgcagctctccaatgcaacagacctgggttttccaagaactgactgcactctctaactaggtaggccagatcgggccgggtaccgagcatcaggtacatcaggctgccaaccacagcacgatatggcttcgatctcatcagttgcctttcatcgttttcggtcggacacatggccttgctcagcttcagatccgccgtgctcggcgtcttgcagccattgcagtcctgcatgttgaaccgcttgagcacggtctcggcatacttctgctgaccaatgaacatcgttctctcggcccggttccgcgtgatctcccagtctagaatgtagtgtaactccccgagatccttcatcgcaaaccggtcctcgaacatcttcatcttgttgatgagctccatcgacggagcaaacaaaatcagatcatcaacatagagagggatgaagaccaactgcccatcaattactttaacagccacgcaggcctccgactgcagcatcgtgaagccctgctcctccaagaacgacttgagcagctgaaaccacactctgggcgcctgcttcaagccgtacaggctcttcttcaatctgcacacccagtcctctttgcctttcactttgtagccttcaggctgctccagacagacctccacgtcaatcgccccattcaagaaagcagtagtgacatccatctgatgcacttcataatcccagacagccgccagtgtcaagagaacacgcagtgtctccagcctcacaacaggcgagtacacctctaggtagtcgataccatcaatctgcatgaagcccttgatcacgagcctcgcctggaatctttcgatctctccgttcgctagatacttgacgcgaaagatccagcgattctgcagcactttcacgtgcttctcacgcggcaccaactcccaggtatcgttcttcatcaacgaatcaaactcatcatcagctgcatttttccattgcaatgagtgctcactctccatagcgtcaccgaaagtatctggctcttcaaactcgccagtactcatgcagcaatagtcctcccaccatgcaaggatcaactcgttcgccatagcacgttgcaactcagctcgtgctttcctccatccagcaggcaacgagttcacatcatcatctggatttgtattttcgtaggcaatgtagacgtagtcaccgaaccacgtgggcggtttacttacccgaccgctccgtgtcactggagggtctttatggcgagtgcctctcgggcctgtgtactcacgaagtgctgtgcaaggaggcgttgatagacgccccacactcgcagcatcactcgacacttggctgtccgagtcggcccgctcagcagccgatgacctgctgtccacctcttccacctcttgactccctggtagagccctcgtctcgtcagcagccggtcccttgtgccgcccactgctgcgtttcctctttctccctggcacgcactcacctcgcaggtggtctgcctcatgtccattgacacgttcctcatcacgttctgccaccttgctagaacgatcacatccagatgctgtagagctcactccacgtccttcatctcgttctgccaccttgctagaacgtccactttcaaacaccgcaaaccgcactctctttggtcgaggcgctgcggcatcaccaccggggcctctcttcttggacccacatgtcccatctgaccggacatcttgctcaactgccccacctggtcggtcatcacatcgggtgtcatcagccccaccagtccgataatcacctccgtctctggagtcgctggccccaccagtccagcaatctccatcatcacgataactacctccatcatttgagtcatcatgcatttcatccagcattggctcaatgtcatcctctactgatctatcaacgcctaaatattccttaccggaggctccacttggcgttgatgccgaggccatgagcaatcgatcagctttattctcatagaacacgacagtatggctgtagaaggccttgttggtcttgctatcgagcaagcgatagcctcgcttctctcgcgaatatccaacgaagaccgcctcccgtgctttcgcctgcatcttccgtctctccaccttgtcgatgtacgacaggacggcgcagccaaacgtccgcaacttctcataagcaggagtctgacggtgccatactgcatacggtacctccatgcctcgaaccgagcttggcataatgttcacggagtatgcagctgtcatcgctgcctcaccccacatcgcttcaggcaggtcgaagtgcacgagcatgcatcgcattctctccgtaatggtgcggaccattctctccgcgacaccattttgctccggagtatgcttgatgctgctgtcaaactccataccatgcttcgtgtcacacgtactttgcagcttcttgaactcctttgcattgtctgaccttagcgctttcattctgacatgctgctgcgtcttgacgcgttgatagtactcctcaaacttctggtacacttccgaacgatgctccagaagatacacggtgacaaaccgactcgcatcatcaacgaacacggcaaagtaccgtttaccaccgtaggagtgctctgcatacggaccccacgcgtccacatggaccttttcgccaactaaccactcgcgggtctgtgtccgagacttcttcatgctcttcctcgtaagtttccccttcacacaggtctcgcaattgaaacccaccgggatacgcaagttcacatgtggcaacggccactgatcatggctgaatagcgcattaaacgcgttcttgccagggtgccccaatctcgaatgccacagctccaaactactcactcgagctggtagcgccaccatggctacctcttggggtctctccaacttcaagcgatagagattggtataatcaacttgagcggtagtcacaccagcctgtaagataacatcagcgcgatctgcctcatcaaagtgcaccttcacacgatcacgttcaggcagatattggttcagttgccgtcgcacagaatagagactgcactgcagctctggagcataacgaacccctcgcagcgtcagtgagcacctcccaccagtagtctccagctctttaaccacagtaccaataccctcaacacccagtgagttctttcctccaactcgaatccgggcgctaagaggcgtgagctccatgaaatcagtgagctggttcgaaatatgactcgatgcaccagagtccagataccagttatcatggggtttgtctgcgaccggcttttccattttcatcacttgaagaataacatacgcgctgtcatcactttcattagcgtagctactcgtttcagcagccttagcactctttcctccactcatcttcacgcgcttctgagcttgggtgctgctgcgatcctcggctggaggtcgcttgccaagaaacgggcaatcaaacacatggtgccctgcttcatggcagtgataacaagcaccacctggcttttgtccactgccggcttgcccacgtccagttccacgtccaccaccttggctgccgcgaccgccagaaccacgtccaccaccggaaccgcgcccgtgtcctccagatcgaccaccacgtccacggccgcgaccacgtcctccacctcttcctccaccagcaaagaacgccttttcttcatcatcattgtccttggcgccctctgctttccgaccttggcgattgtcgtaagccatctccaatgcgagttcaagttgttcataattaggaggatcatcagcatttgggggcttgtgactggcgagaaacggctgtacaacatgatcatattcgcgcggcagagatccaatcaatagtgctggctttacatactcgtccacaggacgcccgactccagcaatggtctccatcagccgacgcatctcgctctggtgatctggcacattgccgttgggagcgagccgtagccgactgagcttggccctctcctcagcgtacttcaggtacgtcttgcccataaatctctttttcaggcgctccatgacacgaaacggggtgggttcatacttcacagtcttcattatgtgattcgtcattgcgtcgttaatgatctccttggcgtgggccatctcgttcgtccacgtcgcgtgcgcctctgcctccttgctctcgtccagctcgaccaagtcctccatgcagtacttccacagcttcttcctctccagcttgagcttgactcgctcgtgccagacctcgtagtccttgccgttaaacggcgggatcgtcctcttctcctcgtgtgactccttgggcgtcttcttctgatccgccgtgacgtcctagttgctgtgctccccacgcgtgagccgtgggctcataacctgaagtggagtgtcctcttggtgctgctcacgcagagatggaagcaacgacaacactcagctgggcggcaaaagccaccttgttggtcgtgtgtatattctcaactgaggcctagattcttctctttcaccttttgtcttactccaactgcaagtagtatagtggggatcagtataatccgcaacactttgcaacttcaaaatgcccgaagcacgatatcgggtctagcttccactgtctgcgcacagcggcgtgcagcctttaagcgctcggcgagattgtggacgttgtgtaggagaatcttcttctctgcttttagaatccaacgcaagtataagtactccttatacaaatcatatccaatttatacaaaccaggtcaaactatacaaaattgattcgtcttcttgtccagctcctcggtaaatgaccatagcgtttgtttccagaagcgatacgacactctatcgggtccagcaggtattgagatgtgggtatctaacgcaattagcataccttgagatccaaaaaaatgtttttattttttgttgctgtgccagagtggcatgacataccaatgtagaatcaaccggcaagcatgtgctcctccacgatgatgatgatgatgatgctgtatgttgtcaccagggcgactggcgcggatcgctctcttgatgcttgatcctttacaacttgcgcgtcccgcttctccttcatggctagcggcttcgccaaggtccactgcgtcgcagcaagagatggtagcatataggtcatagtcggcgccaagacagctgtgcaccaccacagccccgaccgagttgagagatgttctctgtctcccaagcggctcgaagctgtttccctcaccctatgcatgtcgccatcgttataccagtgccgagggcggtattggtggtgtcgggcgcgacatgtaaacggtagagatagtgtgcggtgtagccgcaggaagcctgctccttcgcgactgctgccggtacttcctccagatgaatgagcagcgacgccatcacaagcgcgtctacattgatgagtgttacgagacggcactcaccttcctgaagagctgggtccggagagagaacagttgcgcgaacaccagcgcaggcaagacctcctgtagcgtcccgaccgatggcgtcgcataccaaacgcgcactcacctccgtaatggcgacgttactgtattcgaatatatttggacggccacgcactctttttgcggttggtccttctttcgcgctggacttctcttctaaactatctcaatgcatgatcgtctcgtcttgactgttgattttctcccctgatatgatcagacgatgcagcatgcctcggccatctgtccggtgaaccgctgacttgcaacgtactcgctcgaatataagcccttcgcaataaaaaccggtacttaatgttttgtacataaaaacgccaagattaaagtttaggagttgataaaatatctgataattttaagcttcttggcttgtactataaaataaagtccggactttaatagggcgagtacgttagatagaaatgcctcgatcgactgatggcttgatgcgtgccacttgtagaaacagctcgcccgatagcgcgatgaggagctggtactttctgccaaatcgaatatcgattacacggccaaacatatgtaacatttggcataaacagccgggtcctgcaaacttttaaacccagatcctaccaccacaaccgccgttttctgtactaaattgcgcagatcgctcagcgtacagctaggagcctcctcggtcagtacgccggcaagcagatttccctcgtcagtggcagctaccatcttctcgcgaatcttggcttgcgtctatcatgatgtttggataacgctctcgcaataggttaacaacctgcgagatatatcccatcgtagcagttttggtcaacaggccgccacgcgcactcattctaatttgctggtgtatagcgaaggcggttaatagggagtaaaaattcagactaggtagagctccaggctcagaaagcgactttgcactctgaagggctctcgcttatgttaacaagagccaagaagtcaccgaagcacttcaaggctgtcgattccttgcccgctgtttcctgtaggacgtcaagcacccttgctgctcgctgcatgttgtggagtgctctgtggccggggccttcttagcgtagatagtttctccaccagccgctactcaaacaatgtgattgggaaatattgatgtttaaggataagttaataatcatagttgaaaattgcattggtcattattctgtaattgtgagctcgctccaacataattgggaaaaggttgggaatagctttacgtcaaatactgttggctaaaatgctctattgggacaaatggatgggccatgggtaggacaactacatccataccgtcaaaattccaactgtccgaccaaggtaccggtactaaagcaaatcattttagtgacatctatttcaatttaatgacgctacaaatccccttcattcattcattcattcattcattcattcattcattcattcattcagcttcgagccggacagcacagcgggaggcagcgacacggacggatgcttggcctcgggcagatgggggtcctcgaggccggcactaccaagagcaggacaagcagcagcgcggcaggaacggggacgggtgctcggcctcgggtggggtgatgtccctcgagaccggtattgcaaagagcatacgggaggcgtcgtgtactgctgcttggcctcgggcggtgtgatggccctcggggccagcagcagcaacaacaacgtggtgcgcgtgaaggacgtggagtgtggttagacctggggtggtgtgatggccgccgagtccagcataagcaggaccaatgagtgcggctgcggcgacacggtcagctggctggtctcgcgcgggtgatggccgccgagggctgcaagatacaaggtaaacattttatgtcctgtcgtccctgtggatgtcctattctaacgttatgttttgtgtagtgttgtttatactgtagtaatgaacaagtgcaagaaaatatacaaagaggtttacccaaattatgctgttgttgtccatgtatttatggatgtcggtggtattgtcccttgctcagcgagcctggtgtgcggtgggtcactttaactttgagtttgttagtgtattttgctatgtgttacagtagcagatcaaccttgcgcaggcttcagccgaatgaatgatggaagtgctgatggtggcgtcggatcgacaatgacaccttggtcaacgcgttcatggaactgggcgatgagcgtgtcgagcttaccaaccttttgcatctgacgaagagccttcaacgccgaacctgctgcaaccgtggaggggccgtgtgatttcaagaaggtgagtgcgttctgctgcgcttgatcaccaagctccaggacctcgcttttgtatgcaggcgacgaagtgtcaagcgcgaaaccttcaggtaagaagagcatgagataccctgcgatgtgcctgttctcgtacaacgctgtcttcattgcagaacacacgaggctccgctgtaaaccactcgaaccagatcgtcgacaatgactgggctcccttcttctacgggtgtgtcgtcgtagcccctactggcggtggttgctcgggggcaggaagcgtggcgtcggtgtatgctggctgagtcgcgcctgtgctggtaagtgtcttgaggtgtgctttaacagctaatatgcgctcgtcgagtcgagtcgtttgttctgtatgaataaaacatcgatctgcttggactggcgcttgatgagatcaatcaacacaggagacggctcctcaccaccacttccagaagcttctgatgcaggaggcgtcgcgaatgccaggctgattgccacgctccacaccagcagctcagactcaccgatggctcgttctgctaggagctcacgtatcttcgtgatgtgcgggctgcttgggcagagcactaacatgtcggggtaatgtatgaacagggtagccgtaaggacatgagcgacgtcgtcgtcgaggttcaagtcagcgtcagcgaacgccatcgtgctggaaacgagaagctgctgcaactcgcaagcgtgggccaagattggtgtgtccagagcggctagcgttggtagccgtgcgccgtccttaggcttccaaccgctcagaacacgggacaccttttggtcggcttgggttgtatcaagcatgtacccgaacgccttgttgacgcggtccagctgccagccgccgcgctcaataatccagttttcagccaaggtaccgtcgttgccatgcatggctccaccacgtggaaatgaatgagaggtaagatctggcgtcatgcgaatgcctcgcaaatcggcgagctttttttaactctaactagcaatccgttgacgtatgctttcacaccaggtacgacccgctttgtcgaaggagcttcagattcttccatagaaggctgatcgtcgtcaacttcgagtagttcaattaatgtaagctcctgtacatcatcaatatcatccgtgctgcgctttttggcgatgaactgggggaacatgcgctgacttggtgccttctgcataaccagcgccacagccagagcttgcagatgaccagcggcagcagcacgcagaggacgaggagatggcggggtggcggcttggggataccgaaactaatgtaagtagataaccagttggttcaatgaatgtatgcttctacgtcgtgctgccaccgttgtagagctcgagcacatgtgctggtgcgtcttccagagctctaacttcttgccaaaggtgctggtatttcctaatgtggtcgttcagtttaccttctgcgtacatgcacttcagtaccttgacgattgtgccgtgcgattttgctttgacatgcccagtctccagaaacacaagtacgttcgcatcagcctcccgacccgaatttaggttacgtcctgtggcctcgcccgcctctcctgtcacgtcgtatccagtcggacggaaaatgcgcatgaggcgaccgtgaccttgcactcgtgatagcaccgccggtttggatgtgcactaggcagagggagacgaaaccactcgcaccaacagttgtgagcggcttcgtccgagaatgcgcactagatgccggtctgcttgcagtatcgaatgcagtgcttgacgagtttgagaggcctgcagccgcggatgctggctgcatggtggttgctgccggcgtcccttctagccgctgcacccgctggtccaactctctaatttcacctgccagtctacccagcagcttcgcttgccgcttgaagatcaaggtttgtctccgcaaaagctcggcagcacccgtgcgtcgtgcagctgggttgcttgtgagtgtccttcgcgggctgctgtaaggtacgatgaatagcaattgcccacgcagaaatatctgcttccgtcttcggtacctgacgcaatgcatcttgaactcgttgatgtacagcgaatccagcgatagacgaagcatgtccgggtagggaatggtgacggtagcagtgaggacgtcgactacgtcgtcttgcaagctgagtctgtccgtaaaaaacgtcgcagccgagaaaagcttggcttgagcgaatctgacgcagatccagaggatcaatgcccccaagagtaggtagccgcgacgtatctttcggatcccatccaggtaacgatttgccggcagtgtatctttctgcgccgtccctctatgtaatgtaaatttccgaataatgccccttacccgtatagtaccgtctaaaacgtaaccccactgtgtgtcccagggttacatggttacatcaatacaaatatcaaataatgttttgtggatttattgtcgaaagcatatttatgcatgaaatactttataatatacgtaatttatcagattttgtttgaaaacgggagggtcctaataaatagtgtccggggtattattcggtaatttccgttagttgagcgctttgctcatagcactaatgctccaccctccacggtctagaatccaaggagtgctgatgttgccatcactgatcgcgttttaggcagccccacgacgaaacgaatgcgatgacagccctggggtcgggttcgcaccaaattgtactccacttgtgcagcacgcgattcacgtacgcgtggattccagggacacttaccttttttgaatgtgctctcttgatcggtggttcattgctggggctggtggggggaccggtacgcgcatggggcagttcacgaatgagtatttccccattttagtaggcaggatctcttgtgtatctcggggaaactgaaccacttggagtcgattgcataattgtagtcacagctagagcgtgaaatgggcaggacgtaaaatcatttgggtcgtgaaatatggacactccttggtacgaagcggccttcttacgtttaaaggtgatgaatagacacccacctgtgcaccggtgcgaacacaatacacaaggtcaaaacaatatttggcaaattaatagcacaagtacttaccaggataaacggcgacctggtttttcacgagacacatagtgtctgaagaccacccaacaaataccacagggtgttaaacaggactgcaccctggtaatcctgtgcagaagctgcccccttcaaaatcaccaaactaagcgagcgcagatcgcgtttagtgcgtggtggtgcctggtgcatgaagtctatgccttgcttggagcagtacttatcgaggatcgacgcaatcttttatagccgccgacctgatacagcacttagagccggaaaaggcccaagtaggtgtcttgacgttggcaaagtagctaaccaccgaattctatgggagcagcgagccctttgagctttccgtgaacgctagatacactgcaaatttgtcgagagcaatataggaaatgtccccagttaagttcccacctacaaattcatagatggtgttgacgctgaagcctttcgcggccgcgaagtgctcgaagccgttgagagccgtcccaggtatgagcgctttcgttgacatgaatcgtttctagagtggctatgctgcctccaatatcgtcaatttcggacaccttacactccgcgccaagtgcaatcacgcacccgagtttgtagctatatctcagtcaatatttagagttaggagctgcgctttagatatgttgctgctactaccgttaccgaccccgctcttgtgttaacgatcggcatttccatggctgtggtggggctcacatacaagcagacaaatatggcttagtgacacaattatcacgcagattggaccatacaaaaattcatatattaagattagtggtggggccgtaaaaatcccaaccagtacggcattcgcaacgatgccgcccaagccacgcgtcagcgacgaagaacgcgggagaatccaaggactgcacgaggccgggtggtctaaccgtgctattgcacgccgtgtcggtcgcagcgaccaaacggtggctcgcatcgtcgctccgaaggcgccgacggagccgaagaagctcggcccccccgcccgtcatgtcggaccgcgaggtgcggctagtcgtgcggaaggcagcaaccggtgacttttccgcctcccagatcaaggagctcgtcagcagtgctgcctctctacgcaccgtccagcgcgttcttgcgagcgtggattggttgcagtacgcgaagatggacaacacgctggagctcacggctgagcacatgatcgctcgccatgagttcgcgaaggaatggctactctactccaaggatgtctggctgtgcatcgtcttttccgacgaaaagaaatggaacctggatgttccagacgggtatcagcgctactggtaggacttgcgggttccgaggcgtcaaaccgttcggcgccaaaacggcggtggttcgcttatggtctggggtggctttagccgcggtggtaagacggagctagccatttttgtgggtaagcaaaactcagatgactatgtgtatactctctctgaatacatgcttccttacgctctcaagtactttgggctggagtatatctctcaacaagataatgcttctatccatacgttgaagtgcacggccgaattttttgaggagcaagaggtgatggtgatgaagtggcccgctcgttctccggaccttaatccgatagagaacttgtgggccattttgtcgcgcacggtgtacgacaacggcaagaaacagtactccagtgtgtccgagttgcgcgaagcggttctggtggcgtgggaatctgtcgaccaagcgaccctggtaaccctggtggactccatgcccaagcggctcgtcgaagtactggaaaagcaaggaggaaagacgcactactagttgacccacatgttacaatcattcataatatatggatttttgtatggtccaatctgcgtgataattgtgtcactaagccatatttgtctgcttgtatgtgagccccaccacagccatggaaatgccgatcgttaacacaagagcggggtcggtaacggtagtagcagcaacatatctaaagcgcagctcctaactctaaatattgactgagatatagctacaaactcgggtgcgtgattgcacttggcgcggagtgtaaggtgtccgaaattgacgatattcgagaactgtggtttctggagctatctcaagtttcggagctaaaatggcgttgctccagaaatagactccttggaggtactggggtacccgatagcttcactggagttaagtataggagtatccgccggtattttatccgtaatatatttctgggttatactgggatagaaagcaacgttagtgctgatatcaaataggattatatccgtggtacatcaagtcaaactatgaacccctcttgacatctaacgtactcgcccgaatataagcccgtaccgagaaataccggtacttaacggttagtccatacaaactcaaagctttggagctgatactatatctgaaattttcaagcttctagcccggtattataaaataaagtccgggctctaatagggcgagtaccttaactggtatattttcttgaaaccggtacgaccccagtgccgcactgggccctccaaaaggtttatatgcgtgggcaggctgaaccggtagggtacccatcacactggtatgaccccggtgccccacatccctccaaaaggtttatatgcgtgggcagattgaaccggtgtgctaccgacgacactggtatggatcagtgcatatattgagctgggtacggacgaacgaagtaaagcaaagagaacgattgaggcggatagcaaggttcacatttttaattttataaaacattgccagttaatatatctacagtttgaggaaacgttttaagggcagatgttgcggctgcgaagcaggcgcaggagaggaccgtagctaataagaaaagtaattaaggggcttatacctaaatcttcctatcccagcctttgcggaaccctattttcggataatccggattatatctagctccagctccagaaactacatctctctatttatacaatgttggacttactgacttttgtagacaaatattacttctaagggcaccagcaaatccacggtcggcatcttggaacttacacctcaaccttctagccgaagtagatgctgtcaaacagagaggaacatcatggtgaacccgctagactctgcgctttcttttgagtgcttccacgcgtcgggcactttgtaattgtcgaagttagaggactttgcctagctaggaccttgttgtgtgagttttgctctttctggtgtaaatatacacggtttttgaccattattgtacagtctttcactaaaattgcaattgtttccgcccggaggaagtaaatatttttatgatgttcggacaaaatatgtccggatttgtttcggcgacagttggcctttctcaaacaagtataatatacagtgtgttgattgaataaattaacacaggtcctctggatagagaaggaccaaaagggccgtttggccgggtgtttttgggtaagtttaagtgcggtaattggccaatttatcattgaaaaacatctttagaaagctgggttcgatctagatgcatgccgctacgtgaatgaagcttaggatagcattattcgcaagaacttcgcccaaacacggcacccccgcgtcggtggccgcaactcctaagcaaggtcttgaagtgtctgctatgtacaaagtagaggccgaccaacaaaagttgggcacacttgctgaaatctctattctctatctgcatgccatgtaccaaaaacaacagtaacttcggggataacagcgattttagtttctatatgcattacaacttctttggtgctattgaactatgaagaacaagctctttcatggtaaaattgtgctgcagtagtgccccttattgaggcggttgtgattgccgatcaaaaacacaaatcagggtacttcaagtctacgtgatataatacatacaggggtaggttagtgggtcgagataccttgcttagacgtcgcggccactcgagctcgagaatgcgtcgagtggccgatatagctagttacaaggagctctatctacgctagaactgaaggtgcagtcacgaaactttgccacatgaaagataacaaagtaatgtactttatgttggtaccaattttcatagcgttccgcagtattccatacatttccgctgtatataccgcataacagaactcattattcataccccagaaacattgaattgagtattatttgtgtacgcggcatcaacatgaaaagggatcaccttgaaatatactaggatttgtatgggcatgtactttcttggtgtgtagtttatgtgtcagcccaggtgtgaataaagagatatctgcgaattatgagttcagttatgcggtacacctgacctatattccgtctaagtagggagggttggtgttaatgacattgcggaatactattgggcaactcctattgtaagatttagctgttaatttccttgaacggacacgatattctaatcgttctcgcaatatttcataaaaacgttattttgaaaataacgaatccgatttgcatcacattttccctttatccaaaacatgcagcgcaacggagctcgcggaggcggtcgcggcggctaccggggccgtgggcgaggtcgaggaggaggagacggaggtggcggccgcggtcgaggtcgaggtcgcgggcctccgtccaacgggttcaacgcgccaggctccagcaaccgcggcgggtcgtcgtcggagcccgccatcagcctggacgagagcttctgcatggagatccacgcggcgctgcaggcgctggtggaggacggcgagcggtcggagatgagcttccctcccagctacgacatcacgcagcggcgctacatccactcgatggcgcagaagtacggcctcttctccaagagctcgggcaagaagggcgccggccgcttcatccacgtggccaaggtcaagaagaacgcggccatgcaggaggtttctttgcggctgccggccgcgccgctcaacgcgtcgaccgtggagtggttccctcccgttgtgagggaatatatgaccaggtatccagcccccaacgccgggctcgacccgtggagtgcgcgggacttgagcccattggcctccgtgcccaagcgacaccaaggacgaggcggtgcaccgctcttcaagcctcttccgagtcggggtcaggggcatgagggggtcaagaccgtgaggacgccgcccgttgaggccaccaggttgccggtgtatggataccgagagcagatcttggagctcgtggagagcaaccagctcgtcgtgctgtcgggagacactggttgtggtaaatccacgcagatcccgcagtttctgctggatgatgcgttggctcgcggacgtggagaggagacgaggattatttgcacgcaaccgcgaagaattagtgcgatttcgctggcggagcgagttgcgcgcgaacgatcagggccgcgtggggaagatagcaaggaggtggggcatgcgattcggttcgattcgtcttttgacgccaagcgatccaagctcattttctgtacgacgggaacgctgctgaagtggctcaacaatgacccacttgctcgtggattttcgcacatcattttggatgaagtgcacgagcgcgaccagttcacggatttcttgctgattttgatcaagacgtcgattctcaagcagagaccagacctcaaggtgatcctcatgagtgctactatccaagtggagaaattctcgcagtactttcaacctgacttcccagcgcccgtgttgcaaatggtcggtggcaccaactttcctgtgaccacgcttttcctggaggacgtgttggcgttgctggagagtgaccggagctcaccgttgcctattatggatgactcacgagtcggtcgtattggaggcgattccagcagttcaactggaggagcaacgaataacgggctggaatgtccgttgtgtggtggctcaggtattgctgatgaggaggcattcggtatgcacgtggcaacctgttttggcgaacctagtgcggattttggatctgcacctactccggagcctgagatcacccccatagcagttcctgttgctgctatgggagacgttttgcaagccgcgctgagtgagatcgacgagtctgcgaaggaggcactgctttcgacttacatgaagcaactagacgctctgcggcaggatcaagcagtggactacgatctgttgctgcagctactcttccttgtgaaccgcacgttcccactggatgatgatggaaaaggagccattctcgtgttcttgcctgggtgggaagaaatctcgtttatggaacgggccttacttaactcaccggcaacggcagcgacgtacgagattgctcttctccactcgcgcttgtcagctcaggagcagcgccgcgcattcatgacacctccgcatggaaagcgaaaactggttttggcgaccaacatcgccgaaacgagtcttacgatcgaggatgtcgtgtttgttgtggactgtggcaagtcgaagcaagcgcatgcccttgctgcgacctcgagttcatccttcgtaatgggactgcaaaccacgtgggtggcacgcgcgaactgtgtgcaacgcacaggacgtgctggccgtgtccgtgccggtatctgcttccgtcttttttcgaaggcacgatacgaaaacgccatgaaggagtttatgttgcccgagttgctgaccacgccgttggaggagctgctgctgcagattaagcttcttcagctagagaagaagctgcacattcgcgatgctaaggagttcttgctggaagctatggatgcgcccagcgagactgcaattgatgcctcgttgcagcgactggaagacatgcgcgccctcgcaaacagtggaaatggcaaccaggcactcacactccttggttggcatcttggacacatttgttcgggtggagtggctgtacaaatggcgaagctgctcctatgggggcacaccttcggctgcttcgacgcaatcctgcagaccacgtgcacactgagcggatatcgagaccctttcattagcttcctcggcatgtcacctgaagagcagcgccaggtggacgcttcgaagaaggcttttgcacgaaatgggtccccgccatcgctcatcctacaaagcgaccattttgtgttgtggaaggcgtttgaggcttacctcgacgcacgagcgcgctcctcattcaagacaaaggacgccttctgtgctcggaacaagttgcaccggcagacgctagagcaactcctggccatttacaagcagctgcaccaagacatggaatcgatgggtctctcacctgcgactcaactggtgtcgaccccagtgtcaaggactcctcctaccgtggagagtgttgccccctacctgatggctctgagtattggcatgtacccgaacgcgttgtttactcgctccggcggtgtgagccgcaactggacctccaaagagaaggtgaaagtgaagatggacgggtcgtctatggtgacgtggagcatagccaatccccagaagcacaagaagaagcaagcatcggagcaggacgacattggtcctcccgacgagtggctggtgtatcacgaaatgatgcagtcggagcgtacgcgtgtcgctaagtacggtaccaagctcccgtcacttttgctgcaggcgctacttatgggctccgtggagtcgcagaccgtcgaagagcaaaaagctgacgaagaagttgacgacgatggttccgcggtgccaagtaagtggcttcttgtgctggacgactggatagtgttcgagctgggcagtgcggatgaagcgcgttggctcgcattgctgcgagaacgccttcacgctacgttcatccgacacctggagcgtttgcatgccaatgctcagcaatcaggtagtagtgcaaagacattgtcggaagcagatctgcagctcagacagcacgatgctgagcttctccacgccttggtggcctgggtctcgtctgatctgcgtcgtggtgctcgtcgctaagccagagggagataacgaggtgtagatactgtcgagttcctcgaaaatacatcgacatgaagggaaactctgagtggaatacaacagaggccaaaactttttattctgctgccatagctcatactactgcataatgagcacctgcacgtctacgagaacgatgaccgacggcgcatccgtagctgcagactgttgagcattgcactggctgaggcagaatacgcgttgatttttgggatgggaggctgggaaggcgagtaattgagctcttcggcggcttggaggaagtcgtcgatggaaaactcgtacttgtgcaagtgctgcatgacgcaagtgagggctttgcgcttacccctgtcgcctccgccgtagatctcgacaatgcggcccaagatggcttcgaactccccaagcgtactgcgcaactctgactcactgcccgatcctacacccatggcattaccggaactgttgaaaccgggggcagcaagcagcccgctacgctctcgtgcttgcttcacatcctcctgaacgagcgagcctagctgcttcacggatgtccgtttgatgtgagtgatcttgttgcggaactcttggatgatgctgtgagccatctccgggtagtgcagcgagattcgatcgagcccgtgcaagctgagcacgaagaggctcatgtacgtcttggctcgaatacttgcagctcgcttggagcgcgtgagcatcgcgatctcaccgaagtagctcccctcgagcagcgttgcaaccacctgctcctcgctcgttccagccttgaagactacttcggccgcgcctttgacgaggaaatacatgtgacggcctacctggccttccttgaacacgtactcgcctggggtgcagaactcaggatctaagatccccatgaggtagctcacacacgcatcatcttgcgtggcgaagaagccgatcttactcacgacatcgcggttcaaatgcagcaccaattgactacggagatcgtctgacagcgccgatagaatggtttcctcattttcgtcgtcacgctgtaggagatagtactcgtagtagcggcggagacggtcggccaatggtccagagattcctcgttcacggagataggctttgaggtggtcaattcgagtgcgaaacgtgtccgaagcctcgttcagctcttcaaccacgctagagagtgtacccacgacataggtgaaggttgaggcgccaacgaggactccgatggaaacgtagccaacttccgcaactgtaagcggcgggctgtctccataccccaccgttgtcatggtcgtcacggcccagtagaggaagtaaacgtacatatcgccattcgagttctgttcgtcaggaaaatacgatctgatagtccgtccttcgttcgcatcccgtgctacgcgtgcaacaaaaaagtagccgcatgccagggtgtgtgcgatgaagcttacacggcacatcaagcgcatcacgcgggcgatgttatggtgcgtggataatgccgcccccaacgctgtcgaactttcctctcgctggagtgtatggatgaacttgaacacacgcgctagcttaagcaagcggagagagtgcaccaagctcaagacccacgactgcgcgcccatgtgatggaacgtttcgtctgatattgccacaattaccgagatggggagtgccgacagcaagtccatccaaaaccaacctcgcacatactcgcgccacttggtgcgtcgctcaataacggcagtgtggccctcaccaggcagatcgacgaccacggcagtgcgtaaattgatgacgatgtcgatggcaaacgcaatttcgactataacgtccatgcctgtgctcagtgtagtaccttcgtccccaagaaaagcagcttcgtacgggatggcgatcgcgcagtatccgagaagaatgctggtgaagatatcccacgcaagcttacaccagtggaacggattgatcggtgtcagcagcttccacttgatgagctgccatttcgacattgcgttggtggtcttggcatcttgagagagaagccaagtcatattcatcttctctgttgccgagttgaaaaccgatacacccatagataactggagatcgagagattgcagaagggggagtggcagcgaacgataacttctcaaaacaccatcgagcagcacagtcaacgtagggtacaagttctcgagaccggcaactccagacacggggtcgttgttttgagagacaatgaacacgcgatatcgagccactgtctgctcgaagacgaggtcgtacattgcactcctctcgccgtgatagtcgatcattgcgtgctcagcgtctgggaattcctcaatgagatggtcgaaatcttctttaggtagagtgaacagatcgctcgtagcttttgctgtgtaagtattagcatgcggagcgtactgaaggagcgatgcttcgccaaatacgcccctctccgtaagaatttctaggaccacaatccagtcaggattttcgggcggggttcgtcgtacttcaatgatacctgtgttgagaataaacatttcggttcctacacagccctctctggcaagcacgtctccgttgacgacgatgaggggcttaataaacattgccatatccagcacgaactgggtgctgagccgcttgaacgctgggatccgaaaaaacgtgtttttataagtttcgtggagaatctcaccccgtaaagaaagcgaaaattcacaaagcagctcacgctcatcaaacgcgctcgtcttggcgatatagtggcggaaatatcgcatgagtcgaacctttagagcccgagggaggcgcttcttgtgaatgaaagcttgcaccatgctgagcttccgcgctcgtgtcgttgtttcacggtgccaattctcgagaattttggtcaggctaccaatgatcaagccaaatccgcttgcgccgacaattgagacggccattgagaagagtctctcgcttttattggttgcgtggatgtctccgtagcccactccacacactgtggcaacgacccagtagaagctgtaaatgtagcgctcactgacactgtcattttgtaccatagcgtccttcatccacgtatgaccttcattttctgtggtatagcctattagatgccagaagcacgagaagatgtgcgtcaccagcagcacttggccaataagccgcgtaagcctggccaaaacagcgtccaaatcgaacgcatcttcaacttttgcggcaaagtggcgcaacttgatcaaccgagtcagcttcgtaatgcgcaggagtcgcgttagtcttgcaagccggagcgagagaacctgtgcgttcgagatgctgtcgtcttctccgctgccaatacctgacgtggcatcagtggactggacgagaaaatagtcgagcgggaggaaggccaacacatcaggcagaaaccacgacgccagataacgcttcgcaataagtcgacggtcccgagccatgttttcgtcgtcgtccgggtaaaacccgaccaagaaattgtgaaccacatccagaaagaacaagatattcgagaaaatagctaccacccgcactgcaaagcccagttgaacctctggaaaccccatctggaacggcaccatcacggcactgtagagcacaacgagcatgattatcgagtcccacgcgagtttttcgttgctgcgtgggtctagaatcggagggtccagcaggaagctcagaggccgcttgtagttatggtagacctgtgaaagccaaatgacaaaccgtaagcgtggtcccgggggccctggttgtgaggctaacgctgaacgctgctttcgtaagcccggaagaactttcccctcttgggatattcgtcctgctgatcctcgggggttatttatcatcgaagacgtcgagggcattcgtccaacggatcccaaccgaggcggcacgtggctgggtactggaatcgtgcctgtgaatgacccgcgtcgcgtagctgctcgatccatggcggccagaggggtaatcggagtgctggtagagccccgacgttcttcaaagtgggacccccgtgggaatctctcgctctcagatgcaggcgcgactcgtgaagtcttgcgagacccaaccttgctgaatacgtgggcgtttgggatactcggtctcgcgtcattggcgagtgaactttgcggtccggtgggcatggaagtatggacttgtggcggtccgttttggttcatgacgctctgctccaccacgtcatccagtgcccaacgccgctcacgctgcctcctgtcaagtcttgctccgcttcggctgctgtcgccgtttgcactcctgccttggacgggctcaacgcaatattgtggtggactatccgtcatccgtttcgagtcgtttcgtgacacgaaagctaaaaactgcatttggagtgaggttgaagggggctattcttgattgtttcgcttttcaattccgacatctagcgttatgtggcctatttacgctgaatgcaacttaggttagatagtatcttcttggtcgatggggaaaatggtctcgtggctcttcttcttggagaagtcgaccaggagctggtcacgctcacgacagattgtccgtgggtctggcgcgaaaaagacttgccacactttcggcaagaacgctggagtcagcccggtgatgcagcagaagaacgtgaggaggagtgcgttcgtgatggcaccgacgtacaggatgccgtagaactcccgtccgaacgctatcatggaggagatggcgaacgtcacgacccaccaaaagagcacggaggctgaagcgagtatcagcagaatcctggaactgctggtcgcttcgaggagtagtcgtgcactggcaagcactacaaccgcgaggttttgggccatgccaagtgcccataaatcgttgtctcttcctgttccagaccacggcgcgagcggcaataactctgcaggtaccaagatgatcagagcagaaccgaccacggcctcgaacatccagtacgcaaagcgtctgcggttgaggaatacgtggtggtacccatcctggtagagtcttgggtagaagagcaccgtgcgtgccgagatgtcgtcgtctttgatggagaagacgaggatcgggagtgccgtaaagccaatgttgaacagctgcaggagcgtgtcgaaatacgtgctttgtccggagtaaagacagtaagcgccgtacacgaactgcggcagcaccagcagcacgttcttgtagaacacgtacaacgtcagcactgcgatccgccgattcatggcacggccgtgtaccagtaaaagccgttgtaggaatctgaaagctggcaacgagtagtcgctggcgtccgaggcttgatgtccttcttcaccagcgatgccaactccgatgtgtgctccttggatcatcggaacgtcgtttgcaccgtcacctatcgatagcgtaaccttgtcagggcagaagttgcgtaccatccctacgatcaactccttctgcttcggactgatgcgagcgcagagcacagattcgcactccatgcataactcgaggaattccttctcgatgccaaagcccgtaacagcttcgaccaccgtatcgtcaatcaacagggcaagtccagctcttgccttcggcagcggtactgctccactcttgaacgttattgagcttgaattactgtcacttcctcccagttcgctttcctcacgagctcttcgcagctccttctcgaggaaatcaatcgcgtcctgcttcgatccttccatccacgagctcgagctctcgcataaccgaagaagtctcatatcggccgaaaccaaccgcacagcgtgcgctacgtttgtagccgtgtcggctcggtcgcccgtgagcatccagactttaatgccggcggctcggaatttctctagcgcttcgggggcgccttcctgaatcttgtcctcgatggcagaaactccgacgaatgtgaggcgacattcgagctctgaaatgatcttcgctagctcctcctctgatgccccccgagtggtgttgttcttgagcgccgagtagcgagcgttccaagcgcgatactcatcggcgctcacctcgcgttcagcaatgcacaaaacccgtaatccgttcgcggagtatagcttcatttgctccttcgcctgcagcaccgtactcggtttattggccgactcgctcagcgcctccatgatcacggaatctgcccccttcgtcatgagaatgatcctcccggacggctctcggcacaggatcgagctcttcttacggtcactcgtgaactcgaacaagtgaagtatctccaattcagcatctttaccgtatacgcgcaccacaactcgcgtgttgttgcgatcacagagctccacacccgcttgtgctgccgcaatcaccaacgcgcgctcatctggagacggacctgcgtattccttcttcacaggctttgaggacttagtcgaagcttgagacgtggacgacgcactaggccagatggagttgtttacagccagattgatgaggaacctctgcatgggcgtgctcttgaacgggaaggacgacagagcgatcgtatttctccggcgtgatggtttgtctggcgcttcttcagggtttaatgcacctacgataacctcgtgaacagccttctccaagatcaacagcgagccatctttctcatcaaagtcgaacgtctccccatccacatgacacgagcggaaggccattcgattgcaggtgagcgttcccgtcttgtcggtgaaaatatgttcaacaagcccaagctcctcgttcagctcggaagactggacgcagacgacgtgcttcttgtctaccgtgttggaagacgtagagaaggacggactgctgggggacaagcgcatgcctgggtcattcgtaattgctcgagcttggaagtagcgggtgaaatcgattgtgacttgcaacgaaatgggcacaaagttggagaagagcagcatgtacgccaggaagagccacacgaagtccacgaacgtgctgtctttgatttcgtcagggataaacgggttgcgctgtacgcttgatgagcccacaagctgcgcctccaccaccacggcgacaatgaggatgacgacctgcacgaccacaatccagactgtgatttggttgatgaaatggctcagccaactggccttgatgggtgtttcggaggcattctggcgcacacgcgtgtcgtctcccgtgtaaatgaccacgccgatgacccagggcgtgtcttttagatgcgtgcctcgtagcaacacatgcgagatatccaagcttagagagcgagtctccgatagcaccagcgttcctttgaacttgtcgatcgatcggttcgggggctcgcactcgatgaatacactggacaaaagcgtcgtcgcttgagctgtcaattgctggccatcgctgggaaaacagtcgcgatagggaggacgacagagctccggctgcacgaagcgcggttttaatgaagactcgccgtctagattcgcagtcatcacgtagcattggccgtttggggagcccgacgcgaccaaagcgatgtcggcaggaagctcctcgttctctccgacccgaaccaattccccaactttcaactcttcgcacgttgcggggtggaagctcctggcttttccatcggagaaggtgaacttttgcacttgggctctgttctgctcggcgtcggcttgatgtcgctgcacgtcctccatgacatctcttacgccgctgactacgatgataaacatcagcgggacgaccatggtcggcaccccgttcgaagacgtcacttggggcagcaactgcaagaccgtgatcaccaggaagtaaatattggaaaaacgtgtgaactgcttgaataaatttttgggcaaaaagttgtacgcggtgtagatggctgtcttgacagcgtttgacgggaagatttgcgattgctcgttcgtgccgaactggacggagcggaaggcgtccgggtcgtcagagtccttattagcgccgggctttgacgagatgacaatgtggctgatgctgctcacaaacgaattcgaagacatgacggcttcgtccccttccagcaattcgaacttacgcggcgtacgcaagttttcgagccgccgttgcagtgagttttcctccgatgttggagggagccaagaggatagtccaagtgagcacatgcaccccaggttgagtctatgttggctgtgcaaacagcggtgctcttctcaatataacggttcttggcggacttccagatataggggcagaagctcatgtgtatttgggttcgtgtacttggcaaggcaaggatagcagcacgataggtgagttcagtgagcgaaaaaataggtttgcaacattcatgacggacagatatggagctgtttgagtccactcaaagcgatatacgggtggtggatgggaagcagcgacagcaaactcagtgcccaagctcaggcacagcaggaagagcagtatgcgattcaaatgaagaatccagcggtggctgcagccatcgaagcgctcgagagtaagaagcccctcgagttaatagtcgttctacttaatctgcttgagagctcacggcttggttgcagtcgacaaagcgaccacggggctcaagttttaccagcttttcgctgcgatggataaagagtaagaacacaaaaggattcaccggattcaatacgctcactcgtgttctctacattgcacagtggaagtaaatcgatcgacttggaagaatttcaccagtttttcgagctatcgcacacaacattctccgatcttgtgtttagcaacttgggcaagcaaactccagctcgaggtgtcacatttgatggtagtgcccacaatgcgtatttcctgggggtcccactggctatgacactaattcttctgtgtagacttcgtattaaacctgtggaacttttgcaccatgtcccctcaagacatttatactcacgtttttcggctctacggtatgctcatgcggccacaaattattacgatgacgtaggcctaactacataattcttcttcgcaccagacgatgatcacaacggaactctcgatgctgccgagtgcgaaagcctctttcgtctcctgtatcacacagaaaatctccccagtatagtgaagaatcagctaaaatccatgacttcaaacgatagcggagcaattacccttggttcgtattagtaagcaccgaaaaggtatgaacggggggcgcctaacgtctttatcctattatcctttgtggcagacgaatttctggcgatgtgcacgagtaaagcaaatttgttcaaaccgatcttcgacctgcaaacaagggcacgcacaaagagtctgggggttagctattggtcaagtgccagcaagaagagggcgaaaatactcagcggagacaaagacgtatttgaactagcagcgaaccgacttcaagctatccgcggtcaaccagggagttctccgtctcgaagcaacattttatcggggagtcctgttcgcaagctgtcctcgagctcagcatcttcactgagtgcaacagatacacattcccctaaaataccggaacagccttctggtccagtggataaaaagtctctggagacatggattcaagtggaggcgaacaaagagccccttgttcaagcgtacgtgacggcattcagccaagcgtatgtcgctgaagctcgcttaaaagagcagtcacagaaagcactagctactcccagtcaagaccagcttctgctcgacttacgctacacggtggcagtctcaactaagagtacgaactactgcggcttttgttttgcaccattgccctttactcacaagagagacattatcttgatgaatgtccagggcgagatgaagctaagagtgcgttggaggagctgtgggagcaggagcagtcctcgctgatcgcagagcgccacgacgcggtcactacgttggtaaggagtatctccacaaagaccctacacaagcagacaggcaaaaaggttagcatcgctcctggcaccttttgtcacgtatttcttcctactaaccttttgaaatggacactggaccctgtagtccgctgacaaagtcgtcaaaagctacacgcagaagaagctggacgtcgaagagagcaacatccgcaaccgcttcagcgagcgttggcaaacgttagaacgtgccgccgagcttgtggctcaacgggatctggacgcagccaataaatcctccaaagccgcaggcttgtcgcccacaagaccaacaactggagctgcccccacagcccgcaaataaaacaacaaagagttgcaaataccgtcaaacaaatgacaaaaaataattgcagtgtagatacgattctttctgctggtgcctcgctgactaccgtctctgctgttgctgctgctgagcagcgatggccgtatcgcagtgcgactgcacgcgactctcgtagcccttccacacttggcacgtgaacgccagctcctcccggaacgagtcgcttttctggaagcacgcacagggaaatttatataagagacattatgcacacagaacgcaatggggaacaatacataatagatgggaactgaacgcggcgcacctcgatttgcgtgttgatctccttgagcacctcgtgcagccgagccacggagcctgtgatgcgctgcagaagcgccttctgcttctcttcgtgggggtctgcatgcatattcgttagcacataagctcctagcagcagcagcacaggcggaagacgagcgcgcactctgcatcacgcttggcaagttcagcaatgacaaggaaatcaatttgagcggtttcattggacgaaacagaacagatggatacattttgagagtgtagccatgtctagctgagagtctgcagcactacaacttcgattgcatgcctactcgagtggtacgatggcgctgaaaggcggaatagtctgctcgtctggacgggtcttggctagagactcctccagtagtgtcatgattgcctgcaattgagtctcttggcggctcaattgcgcttggagttggacctgcgttgccgtgagcctgtcgacttgctcttgaagtcgcacgatcggaggcgcaggagcggcgaacgacgggtagttgtgcggggtggagaaggatgatggcggcactgcgaaagacggcgtcgctgaaggcgaatccaagtctgtcttcggcgagtcgagattgcctgtgttggcatgacagcacgtgtgtaaatatccagaagtacagtaactgcagaatcgaataggcgaacgtaccagtaaaggcaatggtgctcgagctgagcgatcgcagctcccgagtgagtgaaatgcggatcgactcttccatcgcctgctcgttcttaagttcttgctttttcagcatgacttcgacgaagccacttccgagtatggcacctgcaaatttatgaacgtgaagtacgatcgagtgagtgttgattcaccaccctggcatgtatgattagagcatttaccaggaattgtaaacagaataattcccctgtacgcacgcagcacaaatgaggggcagtaagttagcatcgagagtagatccacatcgtttggtcatcacgcaccagagcgccagtagagacgagaaggcccggcctgctgccgtgatggggacgatatcgccatacccgagagacgtgatggtctcgattgcccaccaagagcatgtgccgatgctcgagaatacctcaggctgtgccgggttctccagaaagaagctaaggaaacaaccccaggatacagactggagtcaggggtagcagaaataaggcaaaacagcgagtgtcttacattgttgtagaggaagtaagcacaatgacaatggtcatgtagctcacgacgccgagttcctctttcttcagcgcgaaaatctcgcgcagattcttcatagcttggtacgagtgttccaggtgcaaaaacgacatgatacgcaagagtcgaaagcctctcagtgttagcacaccgcgtgaagacacagccactctgcacaaatcaatcatcgccagagttagttatcgtacgcatcaacctttgcatcacctcaataaaaccacgtactgtttctccagcaagatctcgaggtagaacgggagcagcacgacgaggtcaatcaaagacatgggccggaacatccacttcagcctagacaacagaaacacggtcactcccccgtcagtatgttcgagttgaccattccgtcagcaaactcaccttccaaagattggatgcgggaatcgatcgtcctcaacgcacgaccagagtcgaagaaggtactccaccgtgaacagcgccgtcgacatgtacaggaacatctcgtaccagttggacgacgtcaccgctgcaaccaaaacagttatacgctgtcagcactgggtgcatgtgtcatttccgttcccactccaccgccccagcttcaacgtacgctcagcgccaatcggcgaggccgacacatacatagccagcaccacgttgagcgtgatgagcacgagcacgcacacctcgaagacgtaagacgcacgctgcagccccgagcgctgcttgagcgacgtgcggtagtgcagcagcgtccagacgtcggcgcgcagcgaggcccaggagcgcgtgcgctgcgtccgcagaggccgccgcttgggcgtcgatatggccgcagggcgcgcgtctcgcaccgacagctccacgtccaggccgtcctcctcgcgaggcagcagccgctgccgctcgcctcgcgccatctcggatactttttggacaatgagctctccaatctgcatctgccagaatatttcaatgaaatttcggtgcacgcgacacaacgggcggatctgaaactcggcaaaaaaacacaagtacacgcgcggtgaaaaaagttggtggcagcttagtagacaccacgagtgctgggcgaagaggtactaattagctatatctcgtggcgccaagaggcacgccactagtgtactagtagacgacatgcgtgagtacttgctgacaatagactggccaccatcgaccgaaaatggagtaagtcgtacttcgaagtacaatcctacattgccctcagaaacccagcttgcaacgtaacccatccgtacgaactaccgaaccacagtcgaagctcatgtatgaactacatacgtcatctcttcttgatcgagcagcatgcttggtcttacggtattttctttagctaagaaacctcttcatccccagtcaaatttcacgaaaagacctcacaaaactcgtaagctaaaactctccaccaatcacacgcaagtcagcccatgatgtaccattggtgtggcgcggaggggggccgataaaaagaggtgtggcgcttacatttggcctgttgcggagacgcttggagcgtgggtcatggagagttaccacgcgggcgacggcgcgggcaaggccggcgcgcgctccggcagcggctcgggcggcggcgcaagcggcagcggtggaggcgcctacaaggagcgcgggtcgtcgtcccacggcgggcgcagcggcggctcaagtggcagtggcagctaccagtcctcggggcgcgggctgccgcgccgcggctcgtccaactcggtgggcggcgcgtcgtcccgagaccgcgagcgggagcgcgaccgggacagggaccgggatcgggaccgcgagcgcgacagggagcgcgaccgagacggccgcagccgcccgcgctcgcgctccagggacgcgggcggcagctcgcgcgagcggcgcaacagcggcggcagtcgcagctccttcgcggcgggcagcagcccggccgtgcgcctgcgcgagcgcaagaacctgctgctgatgcaccgcacgagcgcgcgccgcaacgacctgacgcccgcggacgcggccacgcgcgtggtcggcatggacgtcaagtacatgaaggtgaggaacaattagggtctcaagtgcagtagggtttcagtccctaggctttttttgttgctgatgaacggctttgtcgagtgcaggacccggagcgcccgtacatcacagacaagctggccatgttcccgagtgtcttcccgacgaacgccaactttcccgaggaaaagttccgcttccacgcgctgcgcaacgcggcgttcgtgagcccgctgcccaggggcttcaaccagcagtggcatctgcagtactcggcgttcacggacaagaagctggccatttttgatgatctgacgagggccacgcgcgcgattctccggttacgtgacggcgcggaggacggtaaaagtggaagtggggatgcggccacacccgccgctgctggtgctgaagatggagcagcggtggcggcgactgcggctgtgcagcgcgcgttcacgaattatttgatgcggcacgtgcgacggatagatgaccgcacgagccacatctggatgagcgagctggcgagtggtgcgcgcagtgcagcggagcttacgcaggcctatggagttccgttcaagcagtggcgagctgttccgggcgtgtccaaatgccctttgctggagtttgtggtgaagtaccgacctggatatgccgaggcgacgtggtttgtgcgaattaatgtagtatacacggaaatgcgggagctggaacgagacagcgctttgcggactggtgactggtttttcagcccgcgacggaaccaacggcggaatcaagggtggaccgacaagctaatcgattatttgcactcaatcgcacggcaggcggcgctggatactggaacaggggcagaaaacagatcgcaggacggtccgcagaattctagacttgcagtaaatagcacccagggaattgggaacaacagtgcgggggcaatttctccgacaaccggtagtggagggttcgcacaacgcgcgcaattggtaccgaggctgcggcatggtgaagtaccggcaacagcaaacgctggagctgtttcaggtgtccctgcggctcctaacagcggtggagtggacatgtctccaccatcaccactgacgtggcacgagaagtggtcatacgtgctgaagttatcggagtatcagttcaagatggggctactggaccgggtgcattattttgatggtttattgtcgctgttgcaaaaatcactcactccacggtcgcggtcgaatggcacccggtgctcggctgttttggccctcggggtgaacgggatcatggaattaatctctgtggtacaaaagctgctaccagaaattttgctgtccgcggatgccgtgctgttgctggttaaaacagtattgcagcatcttcgctacctgctgccgcctggtcgacctgtgcccgcagaaactacaggaagtgcactccaggaggagattctggttgctttgtgccagttgctacgtgatattttgctgaatgggaatgacgtgctcgtccgtcttgaagataatggtacgttgtgtcgaatttgttactggcgaggaaacagaataatgctctaaccgtttgatggttcgcacgcttagcatctccgctatggccagccttcgtgttcaccgatcgatttttcaatcgcgacgcatatggggctaccgctattcaggcatgcatcgaacgttgccagcgaaagaacagagaggttgctggtcgtattttacgactacagcaggcgtgtccgtcgctgagctctgtgggtggaggtcaggttcttgcagcgacgatgcgtaacgaggcacagatcctgcagaccctagatcgtttccatcgtgtggactcgacctcagatttgcaccgcgtatacagcgaggtattcagcccacttcccactgtaagctcaagtggtagtgtgtccccagcagagctcccggtcgatgtagctgcactctttctcgtgtgtgaatgggcagttacgaaccagcgacccgcggagtaccggtatttgtcagcgcttgcgttaatcgagatgcacagcaatgcgcttctagaatacggcaaaaggtacgtagtgcttggacccaaaggcctttttgttgtgcaatccaggtctactaacggtcatgttatgtatcgtgaaatctgctctatagcaaagggctgcttcctcattgcggaccaaaggatcaccaattagttcttcagagcgcgctgcagaatttcctgcaccgttatgagcccaaggtcattactgaagtcacacaagtcatcgagcttttctgtttactggttcggcggcgattattcagtgttgcaagcttcgtcgagttcgcgtcctgttgtaatgaagcagcagccagtatgagcaacagcccgttgctcactcttgcggcaggaggctgtggcaataatgggatcgccaagcgcaaggaatcggcgcccgtggttcacacagcttacaacatcgagtgttcacctggaagggggtacaagtcgagtgatattcaccttctttcctcgagcgaccgactgaagttgtacctatggcagctgccccgtagcgcattcccgttaccgacgtgtgtgcccatgcttccggatgacagctacgatggcgaagtgaactacctgcgttggcttgaagttatggagctgcgtcgcgagcatctcagctactcgaagacacttgaacgcgcccaatcactgtgcatctacgtgtttcacacgcatggccaggctaacgatacaccgatggttgggacaccaggtgctgcaggtgcaactcctgctgctggtagcgctagctcgggggacaccagtcgtgtgatgaaggaagtggaataccagggcaaggtaggagagctagtttcagctgtgaagaccatgtgcggccacgacaagggtcggttcacgcgctggttcttgcacaacatttacgaagaggctacgttctttcgattctcggattatggcagtgtggagcatgtgatgcggcttgtgtgcctggtgctagaaattgtggacatcttggcattgctcgaggtactggtgcacttcctgcgacgctcgccctgcttccttgtgaagaatgtggttctggcgatgattgaacgtcacgagctagcgttctgcgccaccgaccagattccgttcttgctgcagtccttcgtggaccgtttccatcggatccccaaaaatgctgacgacaaggctggcaacgtggctcagttcttctgcagaatgtattacgcacatatcaagaagaaagaaatcgcgaagctggacttgccgtttgctctgctcaagccgattgcagagaccgctcgaaagaaccaggacgctgctgcagctggtgtaaatggaaacgccgcggcaaatgggaatggagcgaatggaaatggccaaaagaataaggagctgtcactggaggcgacaaatccgatcgtgcgaatccctccaccccgcgaagttctgcccccggagctaaaaagcgctctagcgaagtcgttcaaagcgctgcaggctcgtgcctttgatggccctggcgccgacggaaaacagacgccagcgacccctggcgctggcagtagcacgccgttgcagagccctaacagcatgagtcaagacgctacatctactgaatcagtggcagcgttcgaacccaattacgcgagcttgtcctggcaggaggtggttagtgaggctacccctactgcagaggccaagtgccgtgatagcgcgattgatttcgcagtgtccactatcaatatgagcatgacgtcgtcctctgtgggctccacaaacgccaatgccacgcgggagcggcgcacgcctaattacgtatttttcttccgggctgtgcttaccgaagccatggacaagtggatggctaacatctccgcgcgcatcaagtccaactgcaagcggcccatcactacaccgcattacgtgcaccgctgtgtgcgccttattcgtgaggtcgtggagcagcaccctgacaacggtgaggagttcaatgagaagttctcgaacacgctggttgtgtggctgcaaaaggaagtcttgccaggcttcgccgggagtgatacgcccaagcgctcgcggaacccgttcttgaatgccgacaacagcaaggaggcgttcgcgctcaaccagaagggccgcctagatcgactgcagtacggcctcaagagttttctcgtatctcttgttgtgcacaaggtgctagatctctcccaggtgctacgactagtgcttgttccgctcttcccgcgactggtaaggaacttcatcggtactttcctcccttgtattggtcacggtttagatgctcattttctcttttgtcttgctttaccagcgtcgtgcctcacgtgacccaccgccgaacctgccgacacaactcttggctatggcgctcgttttccagctcttttcagaaccccctcagaatttgctacttgatccccaaaaggtggttatgttcgacgagcctctggtgagttgtcacatctgcgcgttgctcttcgctttggttatatatcgttctgacctctttttcacggccaattgtggtgacaacattgcagaccaagtatcacctgcgtttcctccgcacccaagtgccggcgtgcttgatgtttccactgtgcttcttgttgtgccaaatttcgtatcagatggaagacaatttcttactacgcaagcgtgaggaacgtggcacactggcaagcacgacactgttcaacttgacatcggatggcatcgttcgcgatacgattttccatgacacgaaagaggcccgcgaaaagcacattcttccggtgtatcacaagaagcagtggcacacggcggtgctgctgacgcacttcttccggccgccgacgtcgccggcagaagacggcaatggacaggtgcaactactcaaggtggaccagatcattgatcagatgaacgtctggacgcttcatcgtggcggctccatctacttagacttgcagatgagcaggcagcaacagaaggtcaagcgctccaagcgacgcacacgacaccaacgccaacaggcacagaaccagcagcagtcagcacccaataaacgaaaggcgccggcaggagaactgtcgacgcgttccaccaagagagcagctgtggagagcgtggttccattcgcagtcaatggcttcaccgacaacaagacttatctcggtgctcaaggagataaagacctttccttcggcggcagtctgcttggaaacaacttctcagatggagaggaagatgccgacgaggaggaccttgagctggagttgggattcgacgaggcgagcagtgccacggagattctatcgagtctgatcgtgctgcgaaccctcaagcgcagctcgcgcccgcctcctggggtaggatcgacttcgttgtcatcatcctctacgacgtcgtcaaccgtgccagtgccccaaactacttccgcaactatcaccacgctctcatcgtcgtccccccttgcgactccaaagctgtatggtacacctcaccatgtgcatcccggagaggggggcgagggcaagcaccgcgggggtacaccaggtccaagcgacggtcttaagaagaaggcgccgactcctgcactaccgatgactgttgccgctatgcagagtgcgttgaccccatgcgaagctcgcatgctggaggctgctcgggaggcccaagactcagcggtggcatccctctacgctgcaaccgtctgcagcatttccaggcgcgcaatggggtccgtgattgcgaagatcctgcagattctggaggacgacgtcaagcacacgctcccggacaagtttgctcgccagctgaacactacatcagttgtgcatctcgtgggtggcatcatgtgcactccaccaggcaatgcatttctgccccgctacatgatgtcgctggctgcccagctcgagtggctgtacgaggggtgtatgctttacgacaagcagcagcaatcctcatcgggagaacctggtttgcgtaacagtctcttccttcggcgactgcgttgcaaactggctgtgcggctgcagctcgttggcgtgatcggacccagcaagcacgctgtgctgaccatttgctatcgtgaccgcatcgtgaagactttgttcgcgctgctaggaacgtcagttgtctcgactggccctgggctttcgctttttagctggattttggacctcattccagtcgtcaacgcgtctgtcctccacgacaagcaatttgtaagtgctctgtgaacgcctatgcgctgtgtacttcctgtgtgatgactaacgtttggttctaatgactttttaggaacttgtggaagctctacaattaccggacgagcttaagcgacgtgtttggtcggtgctaccacgacctatgaacatgttcggcgcagcgaatgtgtttgtcggtcgcaccgcgccaacgtctgcgcaagcggacgctgctgcgagcataaagccggagtacgcacccgtggatccatgggggttgctggagcatgtgcctcagctgcctagcgatgctcttgttccccctctgcctgcccagatcccaaagcggccgcggcgagtattccggtgtgtgtaatctgttcctccaattcgttggatagagcgaattcgctatacagcattcggcttcaagcggtaggcacccatgatcgccgccttgtgtacgtacctttggcaccaatcatgtaatatggctccgtgcctaaggaggctggagcacgactgactttaaagcatctgatcgctagcaaataacatatttaaaagcaaaagaatgcatttcttcgccttgcagcttcttccagccgggcttgttacgcacgatcgttctactgggcggaggagtcgacggcagttgaggtctccttctcagtctcgtggcgtgtttcctcttcatcctcttcgtcctcgtcgtcgtcgacaccaacccacgactcgaacgccatgaggaactcgttgaagtggatcatgccgttgtgattccagtccatctcagcaaagcgacgctcccagatcgaccagttcttggagtcttcacccgagtctgctccaaacggaaaatgaaatcgctcagtcttgcaatttaaatcggaaactatgcactataaacttacccttgtagccacccgagcgccttttgagtttcttcgtcggtgaatgacgcgccatggaggcctctagctgcacggacatgtcgttgctagaaaaggaaaaaaaaggtgttaggaagaggtccgtggatgaagataatagaagagcgtcatgtcaccaaccgattgatatatccgctaccttcagtgtcgaaccagaggaatgcatctattgccagttggtaagcgcttcggagctcgacgtcctacaacagcgtatgaagtcaaaacttcggcagattatggtacggggcaccagtagatccttacatctccgttcatcgccatggcagtgctggaggtgcttgatccaccgacactattcccaccgatgttgttgttcctgccaacacttccactgatgctgccgttgatgctgccacttcgagacctaagtagcacgatgaagattaggataaagtgcgtcacaggggcaagagtgatatcccgcaacatacgtgtagaagacgctgagtcggtttttctctagtgaagggattcgctgcagtacacaaagccgtcagtacaacgcagttctagacgcagttatgaatgtttccagctcacatgcagcaaaaacccgatggcgagagagacgagaagctccttgaaggtgagtttgccgttctccttcatatcggattcttcgaacacttggttgatctcgtcttccgaaaagctcacaccaagttccttgtagatggccgggagatcgtcggacacaatgtatccatggccctccttgtcgaatgtcttgaacgtcgagcgcacaccgttgaaggctttctgcaattccacgatgaagcacacaaaagcattagcatcttgtcagcgatattaagcgctgtcgccaaaactaaccgcagcctgcgggaacttcaacaagatgcgagtgaacgggcttcagatgaagagaggttagcgcacatgctatataactaagtcaaacactcacgacaccttacatttctttcttgtcgttcagaacgtgggaacgccagagtttctggagcgctagtgtgaccctgacgtaggaaggaagcattgatcagtgagtccacggcatgctcctattgtcactggcaacttactttcgatcaagggggctgtccttgtgcgtgtgcgtggggtggcgatggagctgctccttggttgtttctatagacgactcggttgggccgcacgatgcgtgggtgctaaccttttcatcgcgcggtgaagcacaggattcacccgtagactggtgagatgaatccgcacgagacgtcgacgagtgcttgtggccgtggctgtgaagcctgtgggccgagtgtttggttcccatggtgtttcccaaagtgcgtcctttacctgcccggcaaaacgaacgcgttagcgtcagcgatacgcacttgcggccgttcaagatcgtcttcaactagaaccgttacggaaaaagctcaagcactacgtgcacttctcctcatggcatgtgagcagtctcaaggctatgcatacagaactccgctcgccgatagtatatttatttctcattggaaaagctctctcaatatactatcgattgttgtgcgaatggagatcactacattgctgaataggcttcgaactaagttgaaaactccaaaatttgaccgactccttcggccagacgagcaagattttcttgcgttgcgcttttgccatagttcttgatcaactactccagtaaccttaccgggttcactggccgggtccgagatacactgaggtgagaatttcagcgtcaagttgtttcaaaatgggacttgcttcaaccacttccacaagatcgatccagagaggtttttcctcaacgaggattacattcgccacgtgaggatccccatgaatcagctccttatcatgcagctgccatagtagtccaaagaggtcccgtacctcctgccgtgtcgttggtcgaggcagaggtctaccaacaggagacagcaacaacgccggactatcgagaatttcgatgatctttcccacaggagtaatcgtcaagcctgtatgctgggcgttctccaacgctttcttttcttcatgaagacgctgagccgagtgtttttccacgattttcagggcgaggatctctccgccttcaccaaccaccttgaaaacgcgtccataggcgccacggccgaggaatgtgtcgccctccaccacatcaacaccgaacgcagagcaggcaatggttaagcgctctacccatggagaaatgttgtcgttgataaacttctgaaacaatagtttcgagccgtccatgacccacctcgatttttgcactttgacgacaacagccttgtaggttttgatcaaccaaaaggaccgatggtcaaagagaatagcgcacgccggcttctcgggacaaaggtgctgcagatatcgcaccactcggccaaatgcagcatcagttatagtgagctgcctttcgaacaaaataaggcagtcgaaattttttttctctgctactccaaagcgaagtccattcaagcattgcactccattgttcggcactgtcccgaagcgaaacattccaggatgcgtcacgaatccaaccggttcaaggtctgcattattggtgaaacgtatagacggagacaaccatggatgcccctcgctattgacgaataccataccccaaaagtccaattttttgctgaaatgaggagtaatgaacgcgtcaacctcaacctcattcgcaatagaatcagcttgagtctgaatatccatcgcccaaaacgcttcttcgccctcccttggtgcaacatcgctgataagtccgtccttttccaacctaacaagctcacgttcccccaatgttttatcggagtaggacggctccttgtgccgtaacgaggccatcttctgctcaactatccgctcaatccgcatttgacgtacgcgatcttctcgaaacatcgaaaaggaatcgcggacgctctcacctcgagacgtttgctcctgcttcggaactgccaccagtacatgcgccacctcatttccgagcgaaacacgcggcccaaagagttccacctcgcatcttcaaatacatcgaggagttaaattcgcccagaagcgtcgcgtctaaagcctcgtcgtcaggcagccacttgttctccttcttcgccaggaagaggtgcagattcgtgagttcacacctgatcgtcactgggattttcttttggatcttctccttcaactcttccaccgactgatccgcgtcaatattcacagagaacgagtctgtcgccgcgccaacgatcgcacaaaagagctgcagcatctctcctctctccgtggcaaattctggtttgacaagtttcgagctaaggtcacaaacttagttgattgatacttcaatcacgaactatcatccgacttcactgaaataaaaaacttacttaacatgattcaagctaaacccacactttaagaacgcacgttgtttcgaagtggagctcgcttccatcatttccagaggatatccacagaggctttttctcagccaggatagcgaggacccccgtgaaccaacctattttcaagcgaacgtttctacgagcatgaagattttattatgaaaccacgtcgagatgacgttcattgtctgcaaccaaatattcagacaactatcctgcataacggaaactgctggtgctcatgctgtcatcgtcttccagaccaacccaggactcgaacgccatgaggaattctttgaattggatcgtcccatcgccgttccagtccatttccatgaaccgttgttcccaaatcgcttggttgctcgagtcgtcgctcgtgtctgcagcgtaagagaatatccctgactgtaaatacctgcggcgattccataccaaatgcagcacagtcgtacctttgttcatatcatccgctgtcatcttttttgttggggagtgaagagccatggagtgttggagttttgtggacatctccgacctacgcacgcgcaacgacaaacgtcaaaatacagtgcattgcttggagactgtgcacgagtggcgaacgtaccgattaataacaccatcaccgtcaacatcgaaccataggaaggcgtccaccgcaagctggaatgcgagtctaagcttgtttccctgtagcgtacaagaaattttattagcataaggtagtagaactatcacgatggacgcttagtatgctctctcacctctccaaataagatgaactgtgtgggtgctgaagctggagtactgttactaccggttcgagagcttcacacgcagtaaaatacagggttagatacatgaacaatgatcggctcgccggttgaactgcacttacattggagcgtagaagatgctcagtcgctctccttcgagagagggaattttctgtatttgcacgcagcagtggataaagtcggtcagtgtctcgtgcaataacgcagccggattgttcaatacatacatgcagcacgaatccgatcgcgaggcacaccaggaattccttaaaattgagtttgccatccttcatcatgtcggactcctggaacaccatactaatttcctccgacgagaaattcgcgcccagctgctcgaagaccctcgaaaggtccgcaaactcaatgtagcccttgttctccctatcgtacactcggaatgttgagcggacactgtcaaatgcttcctacgtaatgcaacgtcccgtaacgagttagatgtatccataggaaaacacagaagctgcaacttcagaaaccccaccgccgcctgcgggaacttcagcagaatccgcgtgaattggctgcaacaacagcaacaacaatcacagacacctcctgtcaaccccacaccaacttgaacttgattaaacctccttaaccgtccgtacttgtccttgtcctgttgcgcacgagcctcccagcgctccctcagcgcgctcgtgatccttcacacgacacacaacaagtcagcgccaccctacttaacctcaagtacgatgcattaatatgtaactcctgaaatacgcacttctggtcgagagcggtggggcctcgaggcacctgctcgacgggtcgaacgctcgcgatgttgcccgtcagcagcttggccacggagccgctaggttcgccttgctgcgggggttcagccagcgccgccgacggaccactcgctgccacgcggggcgtggcgttggcctcttcggcgcgcgaggagctcctcaggaccgacggcttgttccccatgggcgccgcgtgcgtgttccgctgcaaaatgcgcaatggtggccatcaagcgcggttaacgttgaagctaagtttagtgggccaatcagcggcgtcagcatactttctccaagtggtcgtactcgccgcgttttggccaatagcaacgaggcgttgcaacaccaaagcgccacagtgcaattgcgcattggcggcaccatgagcaagaccgcggccgacgccaacggcgccaagaagaaggcggcgcccaagtcgcgcaagcgcaagaccagcgacgtgggcgccacctccagagccggcggatcgccggccaagcggctggcgggcgacgccgcggcggcaattgcggcgaacggctctggcgccgatgcccacgcggcccaagcggcgcagctcaagccgttcgtgcgtggggagctggtcgagagcagtaggtgccgcgtcttatgcagcagatcggcacgcagagtgctgctgcgaaggaacaaggcgactaaaataccttattatttctgtgcctgccactccattttgatccctacctgcgtcaacctgcacgccgccgtagtcaagcacatgctgttcggctttggcgacgaagccgagccgctggacgaaacggccgagctcatggaggacctggtggtggagtacgtgcacgccatggtaaggctgcagttgcgctactcttctgaacgagatgtactactacataatagtatctaacaagtgacgctatatatggtagaccaagaaggcgatggagctggcgacgatcaagggcaagctggacaccgagtgcttcatcttcctcatccgcaaagacccggagcgctacgaccgcatcgcggagctgctgcgcgcgaacgacgagttccgcgccgcgctcaacagcggcttcgacccgagcgacgagaaaatgtactgaggaagatacttcactgcacaccccagcttaagtaaacgttctggaacaagcacggcgctgtggttgaactgttcgggccgcacttgcgcttgcattggatgtgtgagcgtgagcattcaatgggcgccgagacaggtactcagccgaaaaggcacaatcttgtccccgctcgagtgcccttttcactagcgccttgtatgcgtcactcttttcctccctcgccggctctgaaacccgcgcctgtttctccccgtcacagacacgagttgagccaagtaatagaccgttgcgtgagcaagccgagaggccgaggcacggtcgcgcctgtgatttctcttccgcccgtgcatgccgcatgctcctggagccgccggacgacgtggtgggcgagagctgcccctcctcccagttcgactccgagcccgcgatgatggcctccgtgcgcgccgagctcccgagcctgccgacgctggacaaggccccagccgccaccgccgccgccttccgagggcccagcaactgcgggtggctacagcagcgctcgcacatccagcgggacgaggcggaaccgccgcgatgcgctggcagcgagtggacgaacaggaactcgcagcggcgcaaggcgcggccgtccgcgtccgccatggtgctggcgcgcaagcggaagcgcgacgaacagcgcaagctgctgaacggcaagaagcagtgcacggacagcgacggcagcgagtacacggcagcagacagcgagcaggacagtctcgacatggaggagcagctcacggcctttgtggaatacgtgcgtttctcagattggtgtggagagggggagcgtttggagatgtggactgatggcgctgtttggcgcatgcagaacgctacggatatggacagcttggacatcaacccgagccaagactttgacggtgtgtgggaaatgggcatgctggtcatgcgtgcaggggtttcgtagtgttcgtgaaactgacgatttgtatattgtatcgtcgactcgacgctgcaggcgacgaggaacaacaggaaacagcgacccaagcctcgcagcatatgcagacgtgtagctggcaggacgtcacggatggtaaggtgctgcgtagtcaacttttgcacctgatgtgaagaaaatggtattgtagcgggcgaggcgtctaagcactatgcttgtttctgtgtgtggattgcagtgaaccagtttcaggaggaggcgtcggaagtttttgacagtgagttgatttgcagacccgctcaaaatttgccggcccacacactcattaggttgattgttctgctgcagacgttatttatgccccacggcccgcttcgatccctacagctagtagtgcatctacttactgtcggccacaagggaagagtagctttgggatcgcttgctcttcgttcctatctgccagcaaagctatacctgagaagagggccgtgtgtagtccgccttctgacgacagcgagggctcgttgagcggtacgtggagatccctcgacaggttggacaggaccgttgttatcaaggcgctgatgtgtgtgtgcttggtgacctttcctgatcagatggctttgacgtagcgacgaatcttaccggcaagatacaaagagtagaggaaaccaatgctggaacaagcccgaagcaagcgcccaaggtgagcaaatcgtatctttttgtctcccccgcgtccatcagtagtgacaatctatctgtgttattgtagccggaatggaggcaacggcgctccgtcaaacgagattgctcgttcttagacaactcgaactattctgtaaacggccggctgttgctcatggcgtcaccgacaccggcaaccgcaagtgaggccagtgaggcgtcgtcggaccgagtcatcgagctcaaagatgggtgtttcgactcaagcgacgacgtccaaaacgcctggcaacaagccccgatgccagataccgaggtctcaagcagtgtgccgtcgtcggtgccagctacagtggatacgatgacggtcatgtctttgtcgttcgcatccggaccctcgagcctcccgacagccttccaaccgcgacttgttcggaagcggaggaaggtcggtcagcttacgctggacggcttcttccgaaagtgagcggatacaacaccgcgggctggctaccaatgatggctggcagcccagcagcaatacgacaactcgacctgaaggcaccaacgagctttcggatcgcgtctctatgacattttggcagctttttgaatattgctttcctgtgcagatagagcctcagcacactaggtagtaagataaagttaactttgtagcagtgaatgaaacagaagaaggcaagtaatgcactcaggcgagttgagttgagttgagtttcgttgagcttgatatgatcgtttcgatccaggctcatgggtaagatcggaaatagtggcgcggtaagatcgtacttagcgctgacttcaacggtacgccgcatttggttttggcgccacgcaactcattcgtcgagtgcccccaagtgcgagccacgcgaacccacccacccaaggctctgcccccctctcactcactccccaacctccccgcgctccgttgacaagaagccacaaccatggcctacgtcacgctcaccaacatcaccgtgctggacaaccccacggccttcacgaaccccttccagttcgaggtcacgttcgagtgcgcgcagcccctcgaggccggtacgtccgtcaaccaccgcaacagcagcattaacttatacaacacactaattctctggtgtattcgctgcagacctggagtggaagatcacgtacgtgggcagcgccgaggacgagagccgcgaccaggtgctggaggaggtgctggtgggccccgtgcccgtgggcaccaacaagtttgtgttccagtcggacccgcccaacccggacatgatcccggacgaggacaaggtgggcgtcactgtagcgctcgtcacctgctcgtaccgcggccgcgagttcgtgcgcgtgggctactacgtcaacaacgactacgccgacccgttcctgctggagaacccgcccgcccgcgtggacgtgagcaagctgcagcgcaacatcctggcggacaagccgcgtgtcacgcgcttccccattgactggtcgccggcgggcgcgcaggaccccaacgccatggaggacggcaacaaccaggcggctaatggcacgggctttggtgccgcgcagcctggcgctcctggtgcccccggcgctggcaacgacctcgacatggactttgtggacgacgaggagctcgtcaaggccgctgctcagctcgaccacaactacacggacattgtcattgacggtaacgctgccgagggcatggaagaggacatcgaccttgaagaagaggacgacgaggatgacgaggctgactctgtcgaagaagccgaagaggaagacgctgatggcgacatggaaatggaggacatcgagcagtagggggcgccagtaatttggtgtgctggtttaaagtcgtccggcacaccgaggcagcaagacgaaagcaagcaggaggaagatactgtatttatagagaaaaaagcgagattgaagagcgaaggaaggggtgaaagcaagcgcaacggctggctgcatataggaagaggaggaggacgaaaatgtttgagtatctttctttcaaagggtgcgtttaagtttctagtctactcagatgcatgcaggtaggaaggtgtaggtagccgctgcagtttagcgcagcttgaactcgtgcagcttgttgtacgagccgctggcgccgtcgaagcgcacgttaatgtcaatgtccaggtcgcgcgggttggtcgcgttgggcttgcaggtgagctcgccctcgatgacctcaccggggctgcaggccagctcgccctccaggtagaacacggtctgcttccagtgcgtgtactcagccttggggcccgtcgagaagctcagcttcttgtgcgtggccgagaaggtgcagtcgaagtaggccaccagcgcgtggcagaagtcctgacggaaggtcgtgagcttgaacttggacgagaaggcgagctcctccttggtcaccttggtcaggtcaatgtccaggatggggcacacgtccgtgagcagcgcgtcgctgcccaccgtgtccacgagcggctcgaccttggcgatgtcccggatgcagctcatgtcgaagccgtagacgttgtcccagaagtcgagcttctcggccttgtaatcgccgtcctcgatggcgccgatgtagagcgtcgagtggtccgggaacatgaggccgccaggcaccaggtacttgtcgcgcgcgtagagcaccgtgtccagcatggactcgtagagcaggaagtagcccatccactcggagatgatgatgtccaccttgtccacgggcagcgtcagctcctccatcttgccctggatgagcgtgatcttgtcggcgaagccgttggccctgacgatctcgcgcgcctgcgtcaggatgcccgagcagtcgacgccgtagacgtgcttggcgccggccttggcggcgaacatggacaggatgcccgtgccgcagcccacgtccagcacgaccttgtccttgaacaggtgcttgctctgcaggatggcgttcatgtacgccttggtgcgcaccgtgtccttgagcatctcctcatggatgccgaagtgcgaatacgagtcgaagtagtagtccttgctcgtgagctccttgggggcttcggtattggcggcaggggcgggtgggggcgtggcggtcgacatggtgacaaggagagattcgcaactgagtccaaggggtgagctggttggccgcaagcctctttatgttgacacacaaacccaaaaaggcagcactcgagttggtggtgcgtagctccttgcgctccgtatggagatttgattggtacacggagcctatagctcatggtcgacgcatatgcagcatgaagcaacacaacctccatgcggtgaagagtactgtactgtagccctggcacatgcatggctattgtctagacgtaagctaatagaggtggtcaaggtggaccaagtttaccaaagggcccatcgacattcatcttcgtcagcccatcttggcttgacactcgcagcacattcacagacacaactgaggatcgaggatgacatggcaaattggcataggaagcgagattccccctccaagactgacctctattgtgttcgttccacttaactcggcagcacagactgcgtccaaactaactggcaaacgaggcactagagcgcccgcccattgcccgaaagcagtaaagagggaaattcccgtgtcgatgattggcattcaagaggtggcgagactcccgagtcgcgacgtcgatcagtcgatcaggtcaactgatttagatggcaccgcggttgcccgacttcttctgggcacggggggcgttgccgcccttggatcccttgttggcgtgctcggccttgttcaccgacttcttggccttgctacgctccttagcctccttcagggcggcgcgagcggcggcacggacctccggcttctggttgcgcttcttgcggatctgttgtcgatacatgcatgtcagaagtcacgctcaatcgtaccaacgcgtagttaaacagcagcggcaacttacgtcctcagccgagacaccgacgatggcacgctggatcttggtggtcttgcgagcgcgacggcgggcgacctcctcaacctgttacgacgacgaagataacgcacgtgagcttctggacgctgatctgtatcaacctaaaacatctgccgatgactactggcaacgaaccttgagcttcttgttcatgcggcgccagcccagggtccacacgatcttggtggccttcttgcgctgcatgaagagcgacttgctctttgagttgatgaacacgtaagccgagccatcacgacggatgaagcgcgagccgtggccggggtagatgcggctctcgctgaacgagcacgtctcggtcctgaggtcaaaacgccgcacacgtcgttagggtcaccgctcgctgtcttttgctgctgtgctagtgagctaattgaacacgagctgaaggcggagcgagaggcgctcaggctggatggaaagctgctgatctgtggagctgttcgtcgactgtagtcatccgagtctgctggtgctctgcctgcctgcctgcctgcctgcctgtgtgggtgcatgcactgctacacccattgcctatgtctgttgcgcctccgcactcgctgtattgcccgcgtctccagaccggagctcatagccatgcatgtatccatagaaaaggtgtcgcacttacttaatcaccattttgcttcagtcttctcgggagaatttatgccaattgactcgctggacgggcttccaggctccaaagcccgcaagggagccgcggcgcgctgccgttacttcaccgtcgccgctgcgaattggctggttgaaatgcgtttacttaagcggcacttaagcgctacttcggacgcgcagccggttcggttacggtccgcggtccgaaagccggttagcgggtagggctaagggctattgtgaaacttcaaacccgaaattcgcgatagcggcgccggcgacagcggtatgcagagctgtcaactgaagggtactacgaaaagcatcggcaatattgccagatcttccgacgtcgggcgaatgcaaggaaccccttaactgtccgatgctagttgtatagaacgggtagcgggggtgcgcgcagtaagtgagaggcgctcatcatttgattgaatggggaacgtacatggtcccctcggatcttactcgttttgcgcgactaccggtaggcactatcaagctgcttggagtattttgctcccacaacagtaattcctttcactaaaggatgctgagcagtgtaacgattgttcgaaggcatcatcaaccaaggtaatgaatgggccaaaatgcgccgggttggagtgtcgttcttgaagtgagattgtggtacttcatcaaaccttgcttttcccgggcggagcacattgcggcaacttacaacaacattggccaagcgctaaccgagtggtggacccaaccaaccccttgcagctctcgtcattgctgccgccattgcagtgcgccgaagcagctttggcaaaacaatcgccgagtcatggtccaagttgaagcacctcgctaataccacaacccgcacaccagctgtacacagcctgaagctcagttcgaaggtatccgcaaaaatcggaacatggctgcgctgctccgccgcgggggccgcaatgctctcagtgcacggcacctccgcgcgtcatggcaagctgcaggtctgtatcgcagtctgcactctagctcggacccccctcccgtgagctcagtgcagtcgtcgccctacgcacaaacgcacacgaccagcagcgtcatcaactttggcctgggtcagccttccgcgtcgctgctacctctggatacgttccgagtcactgcaaccgctcgctttaagccgacccaggacccgttgatgctgcagtatggggtcgccaaagggttcattggcttccgagaggagatcgccaaactcgtggcaggtaacagacagatcgccgaaatgattaccgagacgacggaggacatcgactgagtgctgtgctgccgtgactaggagccgacgctgtcgacccggagacgctgatggtcactgcgggcaactcgcaagccatctcacacgccgcaatggtgtactccaagaccaacaagcgcgtgtttgtggaggaaccgacctactttctggcgcatgatatcttccgtgagctcggattggacttgaaaggcgtccacgcaggagaggacggcattgacgtacgtatcgtatggctgggtgacgaggggggtgttgttgtggcgatgagaggctaaaatgcgctggggttgtgtggatagctggacgtgctggaggacaaactcgcgggtggagacgtccctgcgttcctgtacacgatcccgttcttccacaacccaacgggggctgtgatgttgcccgaccgttgcaagcgtcttgttgctctggcgcagaaataccagttccgtatcatttcggacgaaccttacaacctcctgcacctggacggtggtgcgttgccatcgcttgcgtcctatgatgattccggtctggttgtgtcgctaggcagcttttcgaagatcctagcccctggacttcgtctcggtgagaagaaccccatttctttcatcaagaactcgcgcaacatactcacttacgacgtattgtatcacaggctgggctcagagcagcgaggacactattgagacgctatcaacaatcggagcgcttcgtagcggcggtgggcagaaccctgtcaccgcagccctcgtccatagcggtgagtgttttgcaggccccctaggtactggtatcctgctcaacctgttccctaactttgcggcattgcgtgccatggctcgcggctttcgtccatacgatcagtgctggagcaagacctgctactgcctcacattgaccatttgaagagcgttttccgagttcgcaaagacgccatgtgcgatgctctacgcgagtattgccccgaggtcgcatttacggagccgagtggcggatactttgtgtgggtgcacctgcccgacggcgtgaatgctgacacactgctgaaggagtcaatggcccaccacggcgtcgccttcactcccggcacgcggtgctcgctcgggactctctacggcgatggtgacggcggagtgccgtccagcgaggccatgacgcgttccgcgcgcctatccttcgccttctacgacgaagaagagatccgcacgggcgtccagcggctgcggggcgcactcgacagcttggactgatgcgtgtggtagactagggggtgagagtgcaggaccaccgaaacaaatgacatcatcggtaaagcacgaaacttcaaggacgtgtcttgcgcagcgcacaaaagcacttgcattgggcaccagtggacgtcgttcatgtacactgccagcttcacacactcaccttgccatcattcgtgctgtgtacagccgatgctggtagatatcgtccaacagagagacgacgtccggcaacggaaatcacccgcactgtttgtgcaatttcctgccagatgtgctacaccaccaaccggttgtttctgctcgagttcttgtggctatcccacgcgcaacttcagaactgaagctgctgcgtctcacgcccaacacggcatttcgaatctctccgagcgtcggcgtcgtgcgtcgacggacacagtacagttcactaagatggtgactaagtccaagaaccccatggtggccacgacggcgggcgccatcgccggcggcatcgagacgctcaccatttggcccatggagatgatcaaaaccaacctgcagttgggcaccatgcgcgcgcagtacacggggatgatcggcggcttccgctaccacgtgcagaccgacggtgtcggatcactgtaccggggactggcaccggtgctcgtaggctccatccctaaggccggtatccgcttcggagccttcgacttcattaagcggaggctagcggacgaggacggcaagacgtcagccgtgcgcaacctcgcggctggaatgatggccggtgccatcgaggccacattcaccacgacaccggtaggtcaatgacagcagcagtaggtacgcgcccgagtcttacaaacttttgttgtgtggcgatacagattgagacgctcaagaccaagctcattggtgccaatgccggtgtgtgggaaggaacgaagatgatcctcgcgaaggagggcattcgtggtatttatcaggggctctgggctacgattctcaagcaggtatgtaacagtgacggaggagatatctctcgtgggtccgatcggttaacggaacggttgctttgtattcgtgtactttgaactgtagtcaaccaaccaaggcctgcgcttcatgtggttcagcgagttccagaagcgtatgagccccgagtttctggagcgtcatgaaatcatccacgacgcgcagaacatgacgggcagccagcgagcgtctctaagcctcatcggtggcatgacggcgggaatcttcagtgtcttcggcaacaatcgtacgtgggtcgctgtggattctggtgctaagctaactgttaacggcttgggttgtgcacaacagcgtttgacgtggtgaagacgcggatgcagggtctagacgcacacaagtacaagagcaccttcgactgtttccgccagatgctggtgcatgaaggcgtggggtcattttacgctggtgtggtgccacggctaggccgcgtcatccccggccaaggtgttatcttcatgtcgtacgacagcatcacgatggtcgtgtcccgttacattgagggctgagtggagatactctctcctttcaagtggaccgggccagccagtcgatcggccaccagtgcggtcgccagtcgattcgcgcgtctacaacgattcgttgtcagcgaacgaccgcggtcctgggcggttcgagccttcacagaattggatacaaacactaaagcattagatttcgtagtcgatgagtaattatgcgtgaatttaccgtcagcaggatgctaggtcagttcggaacggcgtgctgtgcaatactgcaactaattcgaggcgttgctgtagttcgtcaaacttactggccgtggcctcaagtggattcatgcatgttcttacctgcttcagacgccgactgcttcgaaaaacaaagttctgggttttacgtgtacgtctgacagtagctatgtacccgtgtttcaattgcaacttctcattcgcttcgcgctcacaccacgtgtatgcaagccgcttcaagtgccaggactcgtatgtttcccgtccgggatccgtccaggattataatatatatatatagaaggtcccaggtacttgacctggtggcgtatatttaggcccttatttcggagcctgctggaagctggcactttgacgtctaagtgagttaccctaaattattcctagttgatcggtttcccttcctgaggtcgtggtgaggcggtggttttaggggatgcggttgcagaggttaatcgggagttccattaggggggtgacttagggggttccaggggatgtagtgatggaggtcgtcgggggtcggaaaatagacttacgtggcgtttgtatcggaatcgctccgggcgagactcgaaccctcagtggaacgcttgatcttcgttggccttacccacagggacactaggggcccctggattacaatatatatatatatatatatatacaagttactgcagtataagattcatgctctttcgtaagacgatacttagccccagagagcctaccgtaagacaaagcgtcttacgttttgcaatcaaacgcattttggctacatcttggttttagtataccagtggctacattgtattttgtccgtcaaaacgtaagacagtttgtcggacaacaatttgcaccatgcgattggccaaaactttcagagggtagtgtcgttgcgtgcgttcctccgttgagcatgtaggaacccgaggacaaccgctttgctgtttttgaattgctcgtgccacctacagtcgagccgacgaaataaggcgctcacaagcacgaacatgtagtcggtagtgcggccctactgccaactacaatgtacacgcttgtttgagaatggttaagaaataaatgcacctgaaccattagcccagcttgacaaacaaaacgttcagggctttatagtgaattctagttaatgcataaccaaatagagcccctcttcctccggtagtgcggcccacgaaccctgtcgtgtcctctgaggacgcctccgagcgaagcagtgcacgacgagcgcgcacacatgctccgcaccgaggcgttgtcggaggacgcgagggagtagacaatcaatacattatgggatcttaccaaagtcatgaaatgaactgttttgtagtagcaacaaggcagcgtcagtcagtcttggtatttgtatttgtatttgtatttgttgcggtttgcttggctaccttactcccggaggcgcacactgctgcagctccacctacgtcggtagtggacaccaccgacctcacccgcggccacgtgtaggtaagctgttggtggtgtcgcaaacaaataactacaaaacgacgtgagggcctctaagagtcaaatgagcggcgaaacttctcgggaatacatgaaaaatgccaaagctaaagtaattgatcagcccggctgaaggcgcttaccagtttgctcggcctgctactgtagtactaggaaatctaaacgatctaagctcgccgtggtgttttaaatatgtagagggagtttgttggtgtcgcagcgctcctccgcacagtcctatcgaaccgccaatcattactaccactactatgctgcgcccgatattagtcaggatacgaagtgcaacgaaatgcatcaaaaagagtagcgaagaggaacgcgggccttcctagcagagcctgcgagcactctgcgcctggcagtgccaacagaattgcaagtcgtactattcgccaatcaaaacactagatttgatttgtcgtcaaactaactgtcttacgaatgctcgacacaagtgattgatcataataccacagtgtagtaatatggtacgggaacgacttgcttggtgtgggtcaaattgagatgtggcttgcagggattttgccctctcatttacaactttatatcggaccccaatttatataaatcggagctgtaggagtctgaaatagggatcgaacattcaaagctagtgaaatccatagtaaagtcaagtaatggagccaaaacccacacaaactacggtcataaacatggcgtatttctgaactagtagtaccgtactacgttccagtgtaagcttaaggcaggctggcctgcatgcacccctgattgcagtggatttgctactgctgaactgagataatcactgcccctcagaattgcaacattatagcggccattcgggtacactgcctaagtctgacctagactatttttgattgaatgattcattgctcttagacaataaatagtctgacctagactatatttttgctaagactatttatgaagcaacacacacaaaagagtcttactcggacttttcatcggccggcttacctttgaagtggtcgcggtgtttcgcgataatatcttgaagatgcgggtagagctgtccaaccgaccaggtaccatcgattccaagtgaaagtccacatcgaattatcgccttgcgcgcataggatatgccatttttaaggttgacggctttcaccgcctctgcagcaagctggaggaagaactttttccctggattttgaccatgggtagcagcgaaaacgttcataaaaagtgttctaaaactgctctaattgtcctaacgtatattaacctaattaagtagaaataccggtaatttattcggacgagggcgagcggatgcgagcgcgaggctcactcgatgcattcaccgatagccaacacccgccgatcaggggggggggggtgcgcgagcgagcggacgcgagcgctgcaacccgatattttttttctagacaccgcacctggccgagccgagaacttagcgtaaggcacgagggggtggggcaggccgcgcagcggcgctccccgagcgaagcgagagaggggcgggccccccgaagtccgtcgctaagtccgcaggtgagagccaacgggcgagtgtccgcccccttagagtttttggccatgttgctgagaccgttcttccaggaagactggtcccgagtactgactgttaactgggaaatgtgcctactaaagtcaagttaatattttttaggaaaattaggacagtttagttcggttttaggaagttttaaccagcaccagaccatgagcctttcttcctgactttgttttgccaattgtccttgatcaattccaacttcttctcattccacttcgttttaaccacaaacaataaaaacacttgcaaaggagaaaaaaatgtaatgtgtgactcgaaccgataagagccttgcacccttacccgcacgacacaggagagactaattttgaagttgaagtggtcagactaattatgaattctacaatttgaccagtacaataaatagtctgaccaagactattttcgaacatagactatttccgcacacagacttattaccgtaggcagtatagctgctaacaaatcggaatggcaatgccatcaaatcgggccactttaacaaatcggccccgatatatcggacatatgaggcgctgatttgccaaaatcgctgcaagccacaatattctttgaagtgttgttgggtcaatcaggggccgcaaaacaagtcctcaagaaatgtgattgtagtttttactttacgaaaaagtaggaaatagcactggtaccactggaaagctccgatttgctgggctatttcgtagcttgtaacccataaaaacaggcacggtgtgcttaatgcaaaatcatatacaggatggacgtgctgccaattcgggccgcttcatatgaaacagttggcgggaccccggtgtcccccatccgaaataatcggtatcggcaattatttatttttatcaagggcagcgttgaaacgatcgagggtcttaccattttcgcttaagcttcgtaagtaaatggcacgacgccgcggaggtggctcccagagcctcagaccgatacgtaaaagaaaaaagcctctgatcggaagcaagcagcgtacaagcgggccgtagccatcctgggggaggagcgagttcagcagatccgtcgggactgggactcatgggacacaagctatggcggaaaagagtgacagcagtcggaaggtgtcgtgctccagcttctacaattaggactctcggaacgtgtgattagagcgatcataccggtcggtggaagtcgcgtagcaagactaaggaaggtgctagaggttggaattgagtcgttgctcacaaggcgcgcaaaacttacaccctggcacgcattcacggaggacgatgttgctcgtctcaaagcgcattgtactacgtggatattggaggatgggtttccgtgcgcccaccgacacccgcggcagtacttcactgagcccaagctgacgtggaagattgtacacactcgctatgtggacgatatcgcccgaatcaacccagatgcccacacactaagctactcccgcttcacccagtacaagcggtactactttcctggtgtccatctaaaacgaacagcggaggatgtctgtgactgctgcgttctcctagatattttgcttcagcagcccaatatttccgaggaagagcgcgaggttgtactactggaaaagagaactcaccttaacgaagcaatcgctcagcggcgaagctaagtacttttctatcccgaaagagtacctgagctactaccccgatgtacctgagacgatcatgaacgcagcttcaccttctagcgcggcggttaacaaatctacgtctaaaacctcaacgaagcggaatcctggccggcctaaaaagaagaaggccggcctgaaatctaaccagccatctatcctgcagttctttagctcgtcaacgaagtaggcgaacggagagaaggagacttgcttttcctttagctaacacatattgtgcctttcacgtattttggcgggtgagctgttaattcagggggaattagagtcataaaagggcgatcaccgcttatttagtgctaagattgttcccctccgcgatcagcatttgagagccaatcgacggagatacgagcggattggcgggtagggtaccgccaatcactctgtttccgcctaatgcaggctggattagcttattccgccttgactcggcctcaccatcgccgctcctaattcggccacggagggacgacccggaattaacatgggaattagctaactcggggcataattaaggtcgataaggaattagagttatgccacggcagaataagtgaaaggcacaatacatttttcaatacatctgatgatttgataccgtcggtatcataccgatatgtgatgagaccccggggtcccgccatccttctcacatgtacccggcattataccgaagtaaagcggctgtgtgttgcgcttccacgctgttaagttacgtaccggcacaaacacgaagagaacgactacgtggtggcctctccccgcgtcggaattgcgccgttgacgtgcttttcggcacgagctccgtgttgttctgcgctgctgacgcgctacggtactgacagcactcttgtagccacaacctcaagcaaggttttccaactcacggggttgtccggaacccgcagagcccgtgctacagagacagaagacgaataccgtatagcactacggtacatgtaccgtaacgcaaactgcgtctacattctggacgcctagcgcgtgtacatgcacatgaatagtactgcatggattaaccagctacgaaagtgcactgcacgtgcgtctggttaagactttagtcctaagtcctatccgtattggacctacggtaaaatgagccaggacaaaaaaggagccacatgacccatacaagaatcaagatgtcgttcaaaccaagggtttcgcccttgtcaaccttcaagtgcacacgtagccatcgtctccattaggacttctaaaaactttagattaggattttcccgactaagtacgaaagtcctaacatgactgtttgaattgaggtaaaggcggcgtaactacattaatcgaccaggtcccaaacgccgctcccaatgaggagagcaaatcataagtgagattccatatgacttcaacaaagtatggactggtttatcggctccaaagccaagaaaaaccttaaggttttatttttggccggctgcgcagccttctccgccttcacactttccgccccgcatctccaacacgacagcgcgctccgagcatgccgcacgcctcccccgccgaccaccccagacccgagtgcccccaggcgcgccccacgcgccccacgcaaggacccgtcgaaagcagctacaaaacccggcagggcgggtgttatgctgccggttttgatagctgtcggccaagcacgaggtcgtgcgcactcgctgacggtatgtgagcgtttttctattgtgtatgactttgtatcgggactgacgggaatgcatacgctgtgcgtaagttgtgggatggcgatgacgggtgcatttgcgccttgaattcgattatccatgttgtatgaataggaatatattaagcgttaatacaagctgcgtgatcctacgactccaagtctttttgcttccattggtgactagctggtgtgcagcggtcgacgatgccaccgttcgctttgggggtgataaatgctgagcagagcgcgtcgtacgaagagcggtggtcaacgcgcagctttctccagcgcttccgtagcgaccccgcggttttggaccggcatttaccgtcgatactcccaagcgcagcgttgaccttcttgtccaagtcttccgctagcatccagacacgctgcttccacagccgatacgcgacgccgtcccgatccagtggcgccgttggtacgtttacctctcgccctgctgctatgatcatgatgttgacgcctgccttgaggtcagcacgaacaaactgttgtttcttttgggttgccgtgtgccacagctccagtgtgtaccagttgtagaagcagccagcaagagagtgcgcttcaacgacggtgtcagtgctcgcctgcggggcctggccagcacagcgacaaggagcaggaccgtcagcgctggtggacttgctctcgtggaccgcgacgagcttctgaagtgtgcgctgcattgctgcgatggccgatagcatctgggtgacggctgcggcaagtatggtggtgtctccattgctgcgttcacccagctgtccgaagttctccgtttgccaagccgcgcgaagctgccgaccccaaccaatgcacgtgtccggcgagagccgagctcccagcgctacgttggttacgtccagaccttcgtggaagcggtacaggtaatgcgatgtgaagcctgtggcagcctgctcctgctggactgccgtcgcgacgtcgtcaagatggatgagcagggacgcgagcgccgcatccaggactaaggcatcaacgttgagcgtggtgtccgtgaagctgctgacgttcttgaagagctggccgcgcagggttagcagctgggcgtactcgagcgcaggaagaagctcgctcaaggtggcaatcgtgggcgtgacgcatggcaggtgcgggtctcggtatccagcgagggctctggtcctcgcgtgtcgtggtacccacgtacgcgaacgccttcgtgagcgagtccagcagccaagctccccgggtcgagatccactggatcgcaagctgcggtgaggcgtttgcatacgctgcggagccgcggcgcaaggagtggctgctcagccctgcggtgagcgtcgggggcagcggggaagaggcctgggcttggcgctcgtagaccatggtgatgacgccgttaatatacttggacacgttggtctcacgcgctttgttggtggctctctctcgttccttggttcagctttctcttcaaggttctcccagtaaagtatagcttcgtcgtggctgtaggtcttctcccctggcaaatccgatgccgccgcgtgcggcactagcgggaacacatagctggaaggctccgacgctctgacgaacagcattccgaggctgtgcagcatacactgctcccagtgagtcgcggccttgtaaattgagatgccttgaaccaccgaagtcttgattcgagctagatgcagaaagagctcccccgatatcgccatagatagctggctcttcctagcaaaacaagtatcgatcgctcgaccaaacgtgtgccacattaacgttagtacagtagcgtcatgcaaactcttataacctgagccaacccccttaatcgcagtttcctgcaccagaacacgcaagtcgctgagcgtgcagcctggagcttcaccagtctgcacgccagctagcaaatttcgctcctcaatagttgaacccattttgtcgcgtattttcgcaattcgcttgctgtctgacaagtacagagggtaccgctctcggagcaggttcacaacttgggacatatagcccacatcagtagccttagcaagacggcctcctcgagcacttggcttagtttgcaagaaaatggagaaggcggttagcaaagagtaaaagttttgacttggtagagcatcaggaatagacagcgacttcgcaatactagcaattgactcctcattcatgttagcaagagctaagaattcgctgaagcacttcatcgccgctgcctcctgccctgctgtcccttgcgggatgtcaagccctctcggcgcccgctgcatcttttcaaatgggagaggagagaaagcagacgagtcacagccaccaacgatacaatcatgatttgtattgggaatttgcggtcaaatatgagtaatgcaacaattacactaaactttgtattggacattattctagcaagactgtaaattcccaaaataattgggaaaatgttgggatacacacgagtcgatcgtgattggctaaattcattgaagaacttgtcctgattggatagatgcaatgacagagaagcgcaaggaatgccaagttgggagaaagcttccttatcctacaataagtacggtcatgtattgtgccttgcacacattttgccgccccgatttaaccgtcaaatcaaattggctcaccaaataaaagtaactgtgtaaagcaggccagcacccataaatcgatcctcttcgaatttctcgcgagactgaacgtgtgcacacacgttctaacgaggagcagatactatatctgatgtggaaaatcccaggcaataggcgctagatcgatctcgatgtggcgtagcggaccaaagctgagccaacaaatcagggctgatgcacggattatgtgcttgttgtattgtattgtgaacgcgtttcgcggtcagtctcgctaccgaagtaaggtcttctgccagtttcgtgccgtccttcgaacttgcggacttgctgtggcataacttttcattgaattgtccattctgaaatctgattgcacccgctaaatctgcgcgattgggctgattttatgtacttcacgctggtccgtgtaaattttgcagaacgtcttgttattgttttgaaaagcttgttgatttggagtgagctgccagtttcctgcctctttttgatagcatttttgtcctaggaggctcatcaccggaaattgcatgtgacgctggaaaaatctaccaatagactacgagagtttaacaaggagaagatgctaattggctaagacaaggaactggttgtaggcacgcagctgcaccttaccttagttcaacattcgcatgcgccgggttatctctctctctgtcgtactctctgccctcgcccacagcccgtcgtgtggcacgtatgcaagtagcgcgtcaacgagtgctttccaccccttccggtctttcgcacagaggcggagaaggtagaggtcacccggacgatagggtctggaggtctgcgtcgagaactagcgttagtcgtcgtctgctttgccacctgccgttgttactggatcgaaaataggcatacatgaagcggtacgcaggaatgcccgccggtctgcgcaggatttggccgaggaggttccatcggctgggaagaagatggtagcggagtgggtcggtcccggtccggtcataaagcttgtcgttggagatcttgtgcgggtatttcaggccgatcactgtgcgtagttgttgccgatgaaagctctcgaggccgagcgagtcagagcccaggtgccaaagttgtatagtaggaccgggagcacgtagcagttgtagagtcggacgcgcgttgcctcagatgtcttcgatggccgaagccacagcttccacatgcggtggagtgctgcagttgcgagggttttacgcctggagatgtcttcacagtcgcctaggagagaactcagtttgcgtgagtttcgccacgtttcttcttttgcgcgctcaattctgttgatgcatccagtcgaactacggtgtacgtcggtgtgttctgtcttggacgtgttcatttgaagagaccactctgccagaatggacggcgcttgggattcgatcaaatgggcgatttcttcgctgctgcagatgaagtctgcgtcgtcggcgtatacgatcatgtcggcgagaagatcgtggagaacgtcgaggcggtcagctaagtctcggagaactgcttctaggtacacaacaaagagaacaggggaaagtgagtcacctcggggagtacctgtgttgctctcgaatggtgtcagcaggtggttgtcgagtcggagtgcgagtctggtgtcgcgaagtagtagtcggatcagccgtagttcatcttcgtcgacgatttcttcgagtacggagagtagtttatcgcggttgacagtgtcaaaagcacgtgagaggtcgattccaaggatgtggaacctttacttgtatcgttgagtgcgtgctgctatccacctgtgagcccatactgctgcgactgggccgaaacccgctttggtgcggggacaggaagcgttcgaccttcggtgagattcggttcagcaccaccagcgagattgctttgcggatgctgttaagaagtacaatgggtcggaggctggcgcactgaccagccggcttgtttggattcggaagtccaagcaggattccgtcgcccaggtggatgttatctccggtgacgaagccttggttgatgatgtcggcgaggggttgagctagaacggttgagccgtacttgagcagctcggcgggtatgctgtcgggacctgttgcgcgtctgttgcgtaggcgattgaacgctcgccggatctcttcggcagtgatcggatgatttaatggtctctggatgccatcgtcggtgacaggagttgggtagggtcgttgaattggtcctggaaatgtcgtttgatcctggatcctgtttcgttgcgactgaggatgaattggcctgtggagtcgcaaagagatgttagcggtgagcgccgacgaaatagggctcgggtgacctcgaacattcgtgcggattcgctcgactgctcaaggtctgttagcttctcgtcgataagtgcactgctgagcatcttgctgcgttcgcgtatctggtgcagtagtctgctgcgctgtttgcggaggtacgtggcgtcctttgaatggtcgttgtagatgagttggcgtaggcggtgctgttcatgtgagagccgcgctagctcggcgtcaactactttggcgtgattgacgtgcggcaagtagccgatagagtccgctgcggcttggatcgtcgtgttcagcgtggccgtccagcgctgcttcgtcgtcccttgttgtggcggtaaatcgccaaccattgtagcaagttgttcttgatagttgcgatgggcttggccatcgtgtactagcaggtgcgtggcgaggcgggtctctcggtcgttgagccattgtctgtgttgccgtcgtagagttcgaagcgcacgtagattgaagtcgagcgtgaccagcttgtggtccgaaggggtgagcgtcccgccccacgactgcgcgttgacgcacagtcgtttgttttgttggctgcagataatgtagtcgatctggttgaagatgctgtggttttcgagccgaagcgtccaggttgttatgttgcaggcacgtttcctaaaagctgtgttagtcagaaacaggtggttagcaccacaggatgaagcgaggacgtggccgtcgcgattccgtctgccgcgtccccagtccccgaggaagctctcttcatcacggcgtcggccgactttcgcgttgaagtcgccaaggatgaatgtcgtatctcgcgatggaagtcgcgtgaatgaggtgttgaggtctgcgtagaacttgtcgatttcgtcgaggggatagttactgtggggcgagtacacgttgatgacgttggcacgctgtgctttgggaaggcggatctgcaggacgccgactcggtctgattgggaccagaacctgtacaaaaacttacggagcgactgcgaagtcgatgccatggcgggggttagatgagtaaatggtacgtaccagccttctgctcgctttgataggcgatgcgggtttcttggagcgccaagatgtcgatcttgtacgtcgatagatccgcgggaagggtctcatgttgcctacgctgtgaggtcagggattgcacattgaacgtacttagccggagatagggcgtcgacttcctcgagcggccttgcttgcatgcggctagcgtcgacgggagctggggttgagagggagggttagtaggtcgtgcagagagagagagagagaccggtgacagactgacagacactgcggagtgtctgccgaaagcgttgggctagcatcaggctggccctagcttcccgagagggcgttaccccaactcgtccaggattatgtgtttgttataaagttaaaacgatctcactatattaaatcgagaaaacttactatggagcggatatttcggtgcaaagcacaatagtaattctcgttcggaaagattgagatcaaggcaacgaatcccccagcagatgattttggtcgtctgttacaggtaagttacctgaggtaaccacaacctgtgtccatcctgtgtccatgtgcgagttgggcttgttcctggtatcaacatggagcaagggggacatctacagcactaataggtgtgcatctagacagcccttacgctacacactgctgaccgcggtcttgcaggatgagtgtttggactgttcgtacatgcgtgagcctacctcattgaagcagaaggcgtggcggatcatcatccaatttgtgggggcaagttcagtagaggacatgcatttggcccatccggaagatctgggattggagcaatcacaatataacggcgatcaatgagctctttgaagagcgcacttgttgctgtgtagtccggtggatgaacgagcgcccccttgcggctttgattccggtccctcctcgctttcattgtcaatttctccatcatggccactcgtcagtcctctcgattttcctcgcggcagttcctggttccggccgtcattgcgctggcagcatgcagttcgtcggcatcggcccaacagtaccccatggaacctaccatggcgcccagcgtcaacttcggttatcctgacagcggcacaccagacgctccaggcaactccacctaccgcaacctccttcccagactacaaccaggaagagcctaccactacgaccgcgcccagcgtcaacttcggataccctgacactacaccaacggtgacggacacgccggagcagcaaacgatggacaaccccactcagggagctacggagcccccgcaaacgccttcggttaccactcctaccgagtcgagcaacggcggcactactggttcactcccgacaacccaaggctcatcagatgaaacaaacggcggcactaatccgactacgcaaggatcctcaagtaacgtcggaaccactggttcgctcccgacgcaagcctccacggaggggtccatcgcccaagccccgtcgacgggcaactccagcggcgcccacgccacctttggcgacgtcacgtccggcagtggcaagtgcgtcgttggcaacccgaacgcctacatctcgaccaaggacgtggaatgggtctggacgcagcgcatgagcaagtacgtgccggagttcaagaactacatcttcgaccagctcgtgaccaacaagggcaagctgccgtactgcgtccgctgggacagcaccaataagctgtccaagtcggtggcgtccaagttcgaggccatgctgaaccggcagttcaaggcctggaacgagtgaagatcgtgggctgggcgacgcgcgatgcctcgctcttcgactggagcgacgactcgctcggcaccatctactcgagcgagaaggacgcggacggcgtgccgcagtgccccgaggcctgctacaagcacaaggacttcgctgccagcgccgacacgagcggctgcaagggcaagccgttcggcatgtcgctgtggcctacgctgggccagggtggcggcgccggtggcgactgggggcagcgcgtggacgcggagaacatgttggcgagcctggaccaggagcagttgacgatcgtggcgcacgaaatcgaccatggcttcggcctccccgacttctacgagacgacggaccagccgaacgaggacttcccggtctgcatcatgaaggccggctcttcgccgacgatcaccccaggcgatggctggatgctgaggcgtgtgctggagcacgtcaagtcccgctacaaattctagtggtgatggtgaagactctatcatcggttagttccgttttgatgtaaagcagagaaggaattgcgtcgttgtgaataccgtatcaagtatgttttgcaaaaaccatttggttcgatttcgatcgcaaaaatcttcgcgaaaaatatatgttttcagaaatttacgcgaaatatattttgataatactaggggctgggataggaggattttggtataatactgtaaaccccttatttttatttttattaatcacttttcttactacaaagtcgtgctgcgcacgaggaagctctgaaatttccaatgcaacgttggcatggctagaaagctagctacatcgtgagaggcagcaatgattgcaagcagaatagtgtaggagggcaacagaacaccagaaaatagttatattaactaagtattcatgatactacgtgtactagtagtatgcactaagtcctcgcgtttgtccgtcgtagccgactctacggtggcggtggcagtgacgatagtgtcattcactagcgtgatgctgagcatcgtggcgcaatagttctccgcgtgtgttgatggggttcttgcgcagcacctcgaagtcttcttgggtgtggatgttgactgtctcagggttcagcgtcgacatgggcgctgttcagcttgggtgacgagaggagctcgagcccgacagactgtagagcagctccagatggatctcgtagatatcgaggacctagtagagcagcgtgacgcccgtgacggccaagtgagctgcgtcatctggttccacttgccgatcttcaacgagccgtcgaactcaacgaggtcaccgacgtagtcctggctcatgaagatggtgctgaccgcgccgtcattgggctgtcaggccgttgagaaccccatggtgttcggtgcattgcgacagccaaggaagatcgacagaatgttgagcggcagcagcaccgtgaggatgtttgtgtacgagatcgtctgcggcttcaagttgtacgtgtagtaggtgtctttggtggcgtagctgtagtagttgtagatgacgttcagcgtttcgaccgacgtcgacgcgctctcctccttagcgtttaccaccgagagacatcagatggatacattcctgaacccggacttgaagatactacaggagaagacccggtcgagatatccctgcagcatctcgtcgtcctgcttcgtcgtgatgctccaacttcgcgtcgtagatcaaatctaccgagtcgccgaagaggggtcatcgttttgtaacgcgtttagccccacacgctcggggttggtcgtgaccgtgctgatgcggtctggccgaaagtgtcaaaacgcctgacactgcgccggtgggtgtccgactgacagccacacctattttatttaggcaaactagtcgcggtatctgctaccgtctaactacaatacacgtctacctgccgtgcacgacttgggctccgttcgtcacaccgtctctagccactcgggtgtacgcccactcgcgcctaccctactcgtcgcagccgtcgagagactcggaagccgtatgctccctattcgttgccttcgccgtcgtccaccgcgtgcagtcaaacttgacccacaagttccaatctgcttgcctctcgtcctgcatgaacgtcgctacgcagtcctcccacgagcggtgaaatcgttcgacaagtccgaccatctggggccgatagggcaccgggttgatctggtgcgcctggagcagttgtacgagctcttcgatgaccttgcccgccagctctggggctccgtctgtcagcaattcacggaacacgccgaagcgcaacaccacctcctgcatgatgaacgttgccaccctctcacccgtgtgctccgtcacgcagcttgccactgcataccgtgttacatactccacggcggcgatgacataccggtcgccaccgtctgctacggggaacgggccggcgacatcaagtgcccactgcaccaccgcgtaaacttcgtagtggcggaatcacctcacgtggtttcgccttacgtgagccgcactcctggcatccgcgcacccagcggcgcacttctcggtaaagcccaggccacaaatgcaactgagctactcgtccatacgtgtgagggccacggaggtgtccactccacatcgttccgcgcatttccttaaacaccgtagaccacagcgtcggtggcaacaccactcgccatccgttagccgtctcgatggtcaccagaccgaacttggtctcgaccgtcatgctgccgtacctgccgtccgtcagcagtctcttcacgaacttgctgcgcctaggcgccaccatcagctcgtcgtcgctcagctggagcgtgtcgtccattgggtcatcttcgtcatcattgcccaagtcgtccacgccgttcgtcatcaccacggcgttgttcgccgcgtccaaagccaccgtcgactccttcgtcgtgttcgccgggatcacgcccttcgtcgagcgcttctccgtcgtcggcagcgtcgtcaccgtcggcgccttctgcgtcgccgccgccttcttcacgcgcgtcggaggcgctattacttcgcgtcgacgcctcgtgccgccgtaggttgtggtgcaggggctgcccttgctcgtggggctggtgtagccactgctggtgctgcactcgccgtcgttggggcgccagtagtctccgtagtcgtagtcctcggctccaccgctacactggcgttcggcacgtccgtgctggtcgcctgtgtcgtagtcgtcgtagttgttcgtcgccccgcacttggtgtcgtgctgctcacaccaggggctgtcgtctaggctgccggctgtccagcgtccgagatcgcgctggtctcgtcgtctcggccggattcgtcgtcgcctggtgtacgtggcgctctgcgcgctcacgtatacgtgcacttcgtcgtatggcaggctcaactgccttcttcgtgcgcctcctgctggctgtcggcgccagcgtggtgctgctgttctcttcgtatacctccatcgccatgccgtcgtgcaccgtcaccataccgtccaccgtcgctgagctgcggttcgtcgtggccaccgcggccgtgtcgtgcctttgggccgttgtcgtgccgtatatcgtcgacgcggggtcattgcttggctccacggtggtgccgttcaccgtcaccaccacctccgtcgtcttgtccgtcagctgctgcactggcactgccggctcggtcgtcggtagctccacctcgcgctcattggtcgcatcctctgcatgtgtcgcttcggcagccgctgaagagacacatactgcatctcctcgtgccatgggcgcgtctggcgccaccgtctgcatctgcgtcgtctcggccgccgtagtcttcgtcgctggtgcagcgtccgctgcatcactcctcactgccgtcactgccggcgccggctgttgtcgtcgctgccgtcccaatgccgctcggacagctgcaggcgtcctcgacaaggcgtctgctacaacatttgtcactccaggccgctacttgacctgaaactcgtactcctgcaacactaacgatcatcggtgcagcctgccggccagatttggtcgcgtcatcagccacttcagggccgcatggtccgtaatgatcgtgaaagctcggccgtacaagtacggtcgaaactgcttcacggtccaaactaccgcgaggcactcgagctccgtgatagagtagttagcctccgccgagtcgttgaccttgctgacatacgcgatcggctgccagccgcgtccgtgatcctgcatgaggcaggcacccaagccgatcttgctggcgtctgtcaccaagcggaatggtagttcaaagttagggtagagtatcaggggccgcgtcgtcaagagcgtcttcacacactcaaatgcaaactcctgcgcgtcgctccactcccattgcacgtctttcttcagtagtctcgtcatcggctcaacgatcgagccaacggcagcgatgaacttcctatagtagccagcgaggtgaacaaatctctttacttcggtagcatcggctggtcggggaaactcacgcacagatcgcactagtcgctcagcgggctgcacgcccttgtcgcttagatgattccaagatattccatggacgtcttagcaaaggtgcactattttagtttaagactcagtccagccgcccgtaatctttccaatacacccgccaattcgatgacatgccgttcaatgccccctacgtaaagatgatgatatcgtccaggtagaccaagcaggtcatctacgtcaagccacgtagtaatccgttcatcagtcgttgaaaagtagcaggagcgttggtaaggccaaagggcatccacatgaaacggtagagcccacgtttcgtcgtaaaagctgtcttgtcgcgattttcttctgcaacacggatttgccaatacccagaacgtaggtctagcgtagtgaacagccggcacatcctagcgattccaaagtttcgtcaattcggggcagcgggtagacgtctttgcttgtgacgctattgagagcgcgatagtctacacaaaaccgtacagacccgtctttcttgcgaacgagcacaacggggaagccccaggctccttcaccgtgctcaatcaccccagctgatagcatagcgtccacgttattgtccacaatggcgtcctccgtctgcgcctgtcgtcttcgtctcatcataatgggagcggcatccccagtgtcaatgtgatgctcaatattgagtgtagtagcaggtggacactcgtcctgtgcgttggctaggtcgcaataggctcgtagtagtcgtaggataagggcacgggtatctggttcctcagcaccgatgtccacatcatgctcgtcgtccaacggcgtcccaactcgtccaaccacgcctgcacccgctcaggttgtagctcaccatgcatcgtcaagagctcaatgtcttgattaataggtatccgcacacccaactcccccaactccttcctgctaggtagcttgatgcgacagccgtatgtgttgatcgcggggatcagagccttgcccttttccaccttggtcaccgccaccgctaaccgcaccgctccattgttcatagtaggttgaaacacgccttcttcaccatcaggcgcacgtccaccgtctgtacggcgcgtctctgcaggttcgtgacgctgaccaaccccacggccaccactgctgagtcatcctccgcttccgtcgttcggaacggaataatcacgtcacggccacggtcagcgtaccgtacctcaccacgatcaaagtccatagccgcccgacgcccacctaggaaatcaacacctacgaggaactcactcgtacatccctcgatgatgcattgcctcgatagtcaccttctggccgtacacgttcaccatctcgaacgtccacacgccgagcacgtccaacaagaagccgccaatcccttcaacatacgccacgggagcgtcaactcgcttccgttcgccacgggccatccagtccgtgcctacgactgagtagcgcgccccgctgtcgatcttcaccagctgctgctcgccgtctccgaacatctcggccgtggtcagtccgtcaccggctgtcacgtccgcatcgctgccgccatctgcctcctcgtccatagtggcgctgtcgtaccgcacctggttcacgcgggcccgttcgtcaactcgcacttcgtcaccggcagcacgctgctgtcgtcgcgcttccagcgcgtcacgtacttcggcggcttgccgctgtcgccgtagtactcgcccggcctcgagttccgccactacccgcgcgacttcgtcatcgtcacgcttgtccttggtcttctcacgcgcccgctgcacctgcagctgtttcgctgcacccgcagcggttttgctgcacgcttggaccatttcacggccatgcgcaccttcgccacgtcgtccaacttcaccatcacctcgtccgtgagctccatgccgagctcgagcggcgaggtctccatactcgtcatttccgttttcaccgtggctgccgtaccgctttcctcagccagtcgcactccgtccgtggtctcgctgccttcctcagaggttggcacctcattggtgttcgcaggggctgggctcggtgccgtcacggcgctctcgtcagccgtggccatctccgtcgtcgccctcttcctcaccatcgtcatctccaccgtcgagtggtccgtcacggcgccgctgacttggtcgtcaccaccgtcatcgcccatctggtgcacttagagcagtgtggccatggccggcctcaccgtgctaacgtatcgctccgcccgtccactctcacgagccgcgagctcatcattccattgagcagcgacagatcttctcactgctgccacgctcccgtcattcgacaccgctttcgcgctgtccgtcaccttgcccttgtcggcggcaggatgggataccgcactatcaataactttcaccccacacgaaaacctgtaggtggcacaagttgtacccatttggactgtccacctgtggaaaagggtgccgccacccagaaccgtgagttgtgcactcacagaacgggtagcactacatgtacccgtatgtgctttgcgcagcgtaacgaccacagcaaggaggagaaaggagacatggagtcaagcagcagcgcttctccgcgaagtcccctccacgtctggatgaaccgacctactgaagtatcgtatttggaagtcagtgtgcgagataaaaaaaacgaaagaaacgcgctagctcgcccacacgtgaacagacaaccattatacagtatgccttctacgtagatcgatgctccttggacggccccaatgtagctatgtccagagggattggctagacacgtttgtcacttatctcgcgtccagggatcgctaaagctgacgaccgattcattctaacagcacctgcgcccagtgttcgtctgtgctacattacccaagccaacacgacagttacttaattatcgcgggacaaactactgggtactaaccacaaccgagctgtatggagggccttgcattagggtgagcaaatgcgttaaatgaaattgatgcgtcattcacggctgtaatttgttagcaacagcccacaggactcgcgaggcgagaagctgcgctggtagcggaactcgccgatcattatggacgcgagcctggtattttcctccagaggggcttagaccgacccgtatccagccgacttgggctcgtcgttcacaacacgcttaatgtacttaatgcaccatccaatatcgattgtgcgcttgtgggatgcgcaaaagtacaccatcgggaaaaaatgtccgctctggtctgagtagccgaacgcaaaaacgacgtatccattgataaccatgctgtgcgtgctgtctacgtgcaaaatggtggcgcaggcatcgcgctcttgcatagcaacgtagttctgtatcatctgtaggcacgtcatgccgacacgcaatgggtaggtcttcgaatcatctccaagatgggacactcatccagacgcgccaggcctcgagtcaacctgagagtcacaaaggatgaccatgtctcttgccggcagtgtcgctatgtcgagctggtcatagagccgaccatcgcacaactcaatcatcggagccatagaacccttgggattcttgcgtctccagttttgacaaagtctgtgacttgactgggccattgcgccggtcccgcaatttcgtgattgtcgatgagcgtgcccagcactgtgtataggcgcgtagcagtcgttttctcaccggtagataagcactccgtaatgtagaccttcatttcttctgtcaacttgcgcttaacgggcgtcggtgggtcgtttatgtccatgatgtggtggccttgctgaaacacctcgcacaagcttgtagatagacataacttaaacttgtatcgacacggacacttcgtcagaggcgggacgtcgccatcgtcgcttgtttccagctgcgccttgcagcgttgcgactcgcacaagacaatccgcgatctcatgtcgtgacgacggcggtgcaggtcgtagtttttgtcggataagtgatcaatagtacaaccaactttattacttttgtcgatactgtgagttggtagagttgttctgtagtccgctaaaccttcaggagcagtcgagcgccatatccgtgtccacggccgacgcggtcgggatcccgaagcgtcctcgccctcagaattcgatgactgcagctgccacccccccatccaaatctctcctctcgtcactgacgcttccttccatcttaaagcgaaaaacgaaagctgaagatggcgcgatagcaaacgtggagagcggttcatgcgacttacaactatttattttaagcaaaatacgacgcgttgaacttgagaatctatttaaccctttgtggctggtggtcctaaaaccttgcaatatgcttggttgtacacatttaatccaatcaaatcacccttctattgattttgacctattgtaatgggcctactttggctcactactttagcttacacgtgtgcgcgtgtatgtgaggaagcgtagcttggtttaaattagagttaattatactcgggcctccgagtatagattaatctaaataaacgaaccaaataatgtttttgggttaaaatgagaactgctatttttgttttatgcttctgacttcctccaaatgtaatattctaagataggaatctgccaacggctggttggcagaattccaatgctatgcatgtcgctcattggctaagagatgctgctctcagccaataggaatcctaagtctctatgcaccacccgtcgtggtggtcgtaaatgtatgtagcctttggtgtgtctacaccaaggtcgagaaagtctctcgaacctctaacagacgtcgtgtctgttagagttacaagtgactgtagccacttgtgcgtgtaaccctgttacattcttggcttggccacatacttgtgcaagtacgtgaaggactacgcgggcatgatacgcccgctgtcacagctcctgaagaaagacgccgagtgggtttggactgctgagtgtcagcaggccttggatgcagtcaagcggggcttgactgaggcgccgatcttggcggcggccgaccaagatcgcccattccacgttgtgtgagacgcatccgacttcgcaatcggatgtgcgttgatgcagcacgatcacgagggtcgcgatcgtgtcgtctactactaatcgcgtcagctgaagccagctgagcgcaactacccggtacatgacaaggagctccttgccatgaagtacgcactcgcgaagttccgagtgtatctactcggaagcaaaccgttcgtggtctatacggaccacgcatcgctgcggacgcctgtgaagtcgccgcacatctcgcaacgagtggtgagatggctctcattcttcgcagagtataacgtccgggttgagtacaaacccggaagactcaatgtggtggccgacgcgctctcgcgtcgacctgactacgccacgactgatgccgacgtcaatgccattgacgccatgcgatcaagcaccccgacgtcgtcactgttggacgacgtgaaggtcgcgttcgcgcacgacgcggacgcgaagctcttgctggcctacggctcagcgcgttctgacaaagctcgtcagaagctgccgaagcatcttcgggctcgtgcacaccgttatcgggtgcacggcgggttattactctacagtgcagtcgacaacaacgcggaccgcgttgtcgtgcccaatgaccatgacctgcgactcagaatcatgtacgagtatcacgatgcaccgactgcgggacatccgggccatgagaagacataccttcttctcacgcgggacttctactgggcccaccagtacaaatgggtgcgcaagtacgtccgtgcttgcgaggtttgtcaacgtgtgaagcctgcgcctttcgcgcaggctcccttgcagtcattaccagtgttggcagtccatgtctttggacttcgtgttcggtcttcccccggacagccaggggaacacgggcgttgtggtctttgttgaccgcttcagcaagatggtacatcttgctgcggtacccgctgaagtgactacgaaacagaccacacgtctgttcgttgacatggtgttcaaacaccatggcatgccgatcgacattgtgtcggatcgagacccgcgcttcactgcacacctttggcaagaagtgtttacacttcctgggagtcaactttcgatgtcgactgcggatcatccgccgacggacgggcaaaccgagcgcgtgaaccgcgtgctcgtagacgtgcttaagaactacgctcactcgttccaacactggagcgagtgcctgccgatggcggagttcgccatcaacaactcggttcatgcctcgaccgggcatacaccgttctgcgtgaatgccatcaggcacccacgcctcccgagtctactcgggatggtggctccttccttaagtgggggaggatctacgactgcaacgcagtagccgcagaatgccgctgacacttgcacagtgtcagccgcgactacgcgcaagaagaagaagaagaacgggtctgtgcagggcacagacaccgcgaagacgaacgcagaggccgggcctactgctagaaacgagctgaacgagttcagctcggacgcaatcaacttcgtgcagcgcagacaagccgtcattcggtttgtccaagacgctattgcagcttccgtcggtcgacagaagctgaacgcagacaatgttggtaggggcaacactaatggattcaagaagggttcattggttttgttagcaactcaaaacctgcctaaacaggcagtttccgacttcggggcgagcaagctcgctccgcgcttcatcgggccgttcacggtgttggcacggcatggcaacgcctacacgctagacattccatctagcatgcgcctccatccgacctgttacgtcgggcggttgaagccgtaccggcagcacgaaccacctagctcggccggcccgaagcggaagccccagcgggagcgaacctctgctccagcgcgtgaacgcgctgggccaagcgtgcgacgcggtctgcgaaccctgagcgacttcagccctcaggatcgccacctcctggttcagagcggcgaactcccggctctgatgctgttccacagcagcgatccgctcctcgagcgtcggatcaaggtcaaccccaggttgaccatacctggggcgtgttcccaccaccgccgcctccgatccgcgacgcccgcggctcaacacgctggattgttgagcgtattgtgaaccatagtatcccgaaaacaaaccggcagccggtttgttatcgtattcgttggagagggtttccgccccaccaagatacatgggagtcacgggacgtccggctgcaggacgttccagaaatggtgagggcgtacgaagctcaccacgcactatcgacgcgaatgtagcgcgagcgctgtaattacctgcagcgcccgaagtttcgcgatcatcgcgttcctcgcgtgccaggaacttggcacggagatccctgagactcgcaggtacacgaatcgtcgtgtacccgtttaggtcgcggtcgctcaagcgcgccgcacccggaagacacaacgtgcaccgttggccttcgggcaccgcgcatggaataccaacgtccacagaggatctgtggagctgctccagccgcccgcgcgtcgagaatgtctcgaagcgctcacgggcatgctaaacccgctcgcggtaagcagtcggtttcttgttgaagttctcaacaaaagcattccaactttgacaaagtgcctgccactcaggcactttgctgcgagaagaggtcttcttgctggagaagtactggagctcgtggaagagcccgatgtagtagtcgcgcctttgattcgttaacggatcaaagtgctgctcctccgcaacagcatcgtcgtggataccgctgcatacgtacagcgggatttcgtttggaggcacagtgttgcccacacggtctgcgatctctgacgcagacggcatccacggatcgcacgctgcctgagtagcgcgcggagagcttgaaggcgccacctcatgcggggagctcaaagccccagcagcagagagcggagtgtcgctctcgccgcgcgaacgcttcgagctcgaagcgtccgagtcgtctccttcacgagggcgtttcgacccggcatgcgggtcgagactatcgctgtcgatagactccttgcgcttgctacaagaggcttcgccctcttccatctccacgtcgtcgtcctcgaagtcaacggcgtcgttgactacagaagaaccttcgaggacaatctctggttgagttgtccccgccgcagccttggtagccagagcgtcacgccttgctttgagacgctcgcggtactcggggatagagagagtctctatcccggcggaggacttcccctctgctgcagcgtcggtcttcttctgaggcgagcttattgcggaatgagctcgagttttctttctccaacgtgaagaattgacgaatggtcaatttccttattgacgtgccgtgactcggcgcgtctaaccttgaggggggatggtgtaacagggttacacgcacaagtggctacagtcacttgtaactctaacagacacgacgtctgttagaggttcgaaagactttctcgaccttggtgtagacacacaaaaggctacatacatttacgaccaccacgacgggtggtgcatagagacttaggattcctattggctgagagcagcatctcttagccaatgagcgacatgcatagcattggaattctgccaaccagccgttggcagattcctatcttagaatattacatttagaggaagtcagaagcataaaacaaaaatagcagttctcattttaacccaaaacattatttggttcgtttatttagattaatctatactcggaggcccgagtataattaactctaatttaaactaagctacgcttcctcacatacacgcgcacacgtgtaagctaaagtagtgggccaaagtaggcccattacaaaagaactgctgcagttccttgacgttcgacggcgtcggccattcattggtcactctgaccttctcagggtcagggcggacgtcgttcttcccgacgagacacccgagcacgggtatctcgctcgccccaaagatgcacttcttcaggttcgcatagagcttgtgcttgcgcatgagcgcaagcagctcccggagatgcaccttgtgcatctcaacatcgctcatcccgttcgcagcccggctgtggacgaacacatcgtcgaagtagctcggtgcgaagtcgcgcaccgagcgcaacaagtgcgtcacgcacctgttgaaggtcgcaggggcgttcttcagaccctgtggcatcactagccactcccagagcatgccgctcggcgtgctcacagccgtgagagggatatcgctctcacgcattaggatctgatagaacccatcgcgcagatcaagagcactgtaaatagtgctcctggccatcgaatcgatcatgacatcttttcgcggtatcggtgtctgcgccggtatcgtcgcatcgttcagcttgttgtacgcatgaacgatgcgccagccgccctatggcttcttgacacagaacgtcggagcaccgtgcggggacttcgattcccgcacttgtccagctttgcgacgactctcaaagacgtcgtcgatcgccttgacctgctctcgcggcagtggccactgccgcgtgacacagtacttcgtccccggcacgagatcaatctcgtgctggatgcccttgtcctgcggaagctccgcagggatctcttccggaagtacgtccgcgtactcgcgtaagatcttgtagtagggactcgtcttcaacgagtcccagctctgctcttcaaagcgctccttcttcgtcttcgcactgagagtgtcctcgctctcagtggtggtctccatgaagaactgcctcagttcttcattctcgctcttcgttctctcggcgtccgaaagaatgcatatttggtcgatgcgtccatcgtgcaagtcacgcgcgaagcgcttccagctcatgagctggaagcgaagtcaactccgacgcttgcgtcggaggattagcgagggtcatctccctgtaccggaacccggcacaggtacgcgtcaagacgttcaacgtttcgacgtccggcttttcagcctccgtctgcccggcagacatttcttgtagcgtctcggccccaggccgagacttgtgcagcgaccatcgcatgcgccgtcttcttgtccggctccgcatgactcttgacctcgtccaggcccagccgtgggcgggtgttcttcttcagtaccgccggcgggttcatcccgcgagcgagcgacttcaagcccggcttggtcgcccgacgcttcgtcgtgctgcccggctgcacgacagcatgcaagtgtttccggtgcgggacgtttgcaaccgtccgcaccgcctgcagcgccagttcccggaaccgtcgcaactttaatacctcgacgccaaccattggcggagacccccattacggagggtgcgtcggctccccgagccgacgaatcaaattcacccaagtcatcgactcccggagtcgatggcgttacgtcaccttggctcttattattggccagacctgatccaatcagattcgcgtcagcctccacggtggaggcgtgtgacgcgcctgcgtcatccgtgccccttgaggccggagactcttcctgattcgctgaaaagcgggtgtcgacctccgaggtcaacacatttccttcattagctgtcggcggcaacaccgacgctagctgctcttgcgcgtgtgctcgcgcgcgcccagggcgctccgggacagtggcattaggcgctgtctcgagtggggagtcgcgcgcacctgtcggtgcgtgcgtagcggcaacagggccatcgctcactgttccgctgtcgcgaccgaagcgcacgagagtgcgcttctcccaatcgatgaccggatcatgccgggcaagccacggcatgcccaatacaatgtcaaacttatcgtccagatccaggacgataaaggtctcgacaaactcttgatcttcatacgtgaagcgcacgcgtaccatgcgcttctcggtcttcacgacggcacccgttgccagtcgtacttccaacatacttcgaggtatctttaaatcctcgaagtcaagccttgatagacttcgcagtcgaacaaagttcttcgacgcgccagaatctaccaaagcacggagagagctgcttgctctcatcgagttcacgttcaggatgccaaggtcaggcttgtcatcttggttcttgcagcgagaatgaatctcactgggggctgcagtcctcagtatcgcgtgtccaaggtcgacacgcggaactgcattaccagtagggcgccccgcgcctactggcgtccagcgttttttgcttggttgcgacggtgcccggcaccgccgcgatagccaccctgctggtgcacgggggccgtgcactcccgagcaaagtgaccgactctaccgcgacggtagcatcgcacattgtttccctgcgactgctggggtccagcagttgcagcactcgagaggtccatgggttctgggcctcccgtcctcactaccgggcgtggctgtggcctcggcacatgtgcatgcagcttagcctgccgcaggctaaactcctcctgcattgcaagggtaattgcagcttcgagagtactcgggtactcacggaagagataggtcttcacaggcccatctctcagtcccttcatgaacgtgacgaccttggtcgcctcatcgatcggattggtcacgatgttcgagaccaagtaccgtgctctctgagcgtaagcatggacatcatgcttgccctgctgcaggtcgaggaactccgccctcggccagaactcgttttgcggtggctcaaacgcttgtctgggctcttccttgaaaccctcgtacgtgctaaagcacgtaggatccgagagtcggcgtccatacgcccaacttcgagcacgtccgccaagacatgacatggcgaacgcaaccttcgacaacgggtcgatgatatgtcgagccgcaatggcagtgtcgagtttgacaagccaacggaggagaggctcgccctcttttccgacatagttactcacatcgagctttagcgattgcgcgcgtgatgtcgtcccggacgacatcgcggtagtagcagcaacatcgcgttgctccttcaggatgaaacccagagcaacaccgtgttgctctgtcggcgttagcgtacgcagcatcgtagctacagccgcctcaccaatgactgttgacagtcgttggagggcctcccactctggatccgacaggtggggacagtcagcgcgtgcaacgtaagttgcaggcgtagtggagctttccgtgggcacctctgtatccatgggaaggttctcagttccgcgttcgtgcggtgacgtacgaactcaggtagtcggtcgttggacggactacaaagtgataccaggtgtaatgggcctactttggctaactactttagcttacacgtgtgcgcacgtgtacgaggaagcgtagcttagtttaaattagagttaattatactcgggcctccgagtatagattaatctaaataaacgaaccaaataatgtttttgggttaaaatgagaactgctatttttgttttatgcttctgacttcctctaaatgtaatattctaagataggaatctgccaacggctggttggcagaattccaatgctatgcatgtcgctcattggctaagagatgctgctctcagccaataggaatcctaagtctctatggaccacccgtcgtggtggtcgtaaatgtatgtagcctttggtgtgtctacaccaaggtcgagaaattctttcgaacctctaacagacgtcgtgtctgttagagttacaagtgacggtagccacttgtgcgtgtaaccctgttacacctattatatcacttgcgtaaaaccaagcatagtgcgaggttttacaacaataattgcaataaatattggtaaacccctgcaaaatgatatattatgctgtggggtacggagcaaaaccaagcatttatgcatgttttacactttactatagggacttcagtatacaaaatcaaagtattatattgatcactaaagggttaagtggtagcacttcaacttttgattggatttttttacttggtggttgggccttttttgtttggtggtcgtcccttttttctatgtgtgtggatatgactatattttgggtggtgatacaccttttcatgacagcacagccctaaagttgtggtgcgaagaagcctcactcctgcggcgtcggcaggaacgtcggcaggtccaagtcgcgtatggttctgcgtctgttgtgatggaagtcatcgtcgcctgggcgcgtcgcgggttgtcgtcgtccgcgtcgcccaccacggtcgttgccgtcggagtcatcgtcgctactggaactcgacgagtcatcatcgtcgctgctgtcaccgccgaactgtggagaagtgctgaataagaattgctctctgagaaaggcggcagggccgatcgactggaagtatgggagatcagcgatccagagacaggcagcaagattctgtggatcagagggagttcttcgggagatctcaagtggcccgatgacgccggcgcgtaaggcaggacatgtggcaagccggattgtggatgatcgtgctcgaaccgtggcgtgattcggggtcgacccaagccccgatcgacaacagatctcgcagatctaggacggccgaggacggaagatgatggatcggctgcggacggcaaccggcaccagtcatcgatcgggtgttgatcgccgatccacgatccacgatcaacccacgatcggctcctgatctgcgatcgatctcgatcggacgcagagcgaggactaccgcgctgctccacaaactatccccgcatcacgctaagacactcgatcgtcaccaagtgctgcatcttcggagccccgagagagcatatccagcccgccgacgggtacacaaggtgaaaacatcttcagccgatcacggatcgttgggggaccccctccgttagtcggtgtatgggcgctggtgggaagctcgagcaggccttaaccagattttggccgatcccgctacaccacagaacgccacctgccggtgcgtggcagctggctgatcttgctgcggggctgctggtgcctgtgccgtactcgttgaagctggcgggttcgtcacaggcgctggcggctgctgcgtcgtcgccacctgcgtgccggagtccgtgggcgcctgggactgcgccgggttcgtcgccgtcgtgctcagctggtccagccgagcgtccatcctggccatcgtcgtcaccatctgccgcaacgcggccgtcagagccgtcagcggagccatcgcagcgccgtcgtcgttggtgctggctggtgcttcttgcgtctcgcttggggcgtcgtcggcaccgccctcgtcgggttcgtcgcttgcgttgttctcgtcgactgggtcgctcgccttcgtctcttcgtcctcgtcctgattcgctcgtcgccagaatcaccctccagcagctgggaccgtcgtcgcctgattctgattcgccggcctgttgcccgtcgcacgtttcgcttcttctcttccgccacgtcggtgctgccgacacctggtatcagcgccatgtgcccagtggtaccgttcgcgggcacgacgtaggtgtcaggggccgtcacgaaggcttggccaatgttctccatgccctgggccacgttgtcgatcgggtcgttaatctcggtcgccttgtccacgcactatgcccggcgaatcgtatgcagatttcgcagctgctctgcgagatctgtgcggcaacaacaggattcgcgaacgtgtgctgttagcacaattctaccgtagtctggatcgcacgacccgactcctggtcaagcagaggccgaagcccgaatcgctggaggaagccgtgctggacgacgacctccatggccttcgtccttgccatcgtagagtcttcggatgtcttcgtgaggtgccggcttcgtcgaatgctttgtctaggtccctgtatgaccaccatgcaaagtgtttagccccacgcgctcggggttggtcgtgaccgtgctgatgcggtctggccgaaagtgtcaaaacgcctgacactgcgccggtgggtgtccgactgacagccacacctattttatttaggcaaactagtcgcggtatctgctaacgtctaactacctgccgtgcacgacttgggctccgttcgtcacgccgtctctagccactcgggtgtacgtccactcgctcctcccctactcgtcgcagccgtcgaaagactcggaagccgtatgctccctatccgttgccttcgccgtcgtccaccgcgtgcagtcgtccaccgaggtctctcgtgaatctgcaccacgccccgcttgccgttcgttcgttcgttgtgctcgctccgagcacgcgttgtagatccagccggcttgctcgttagtcgtccagttcggaagtgagctcgctccgttgagatcgcagcgtccgtggggtccgaggatcccgaggtccagatcttcgccgtgctgccgatcctgccgaccgcgtggtcagctggattcacgtcccactcggccgtgaactgcaacaccgccatctgctgtctcgtcgtctcgctcgtcgtggagacgccggcctccctacagtttgactccgatataatcttatttggtctgcgatagtagcactaaacgttgcttcctatcccagtatattttgttctgtgaaatttaatttatttcagatttcagagtctctcggtgatcaaccactttccgcgctattttatgtatcagagtttagcgacaccctctttgcttaaatggaagatctgctgtactggtcacccacttctcaaacttcataaataaagttttttgttaaaaaaacacagccttcgtaatttaaagggtctgattgtccataaatcttatagttaagactacacaatacgcaattatcgatgcagatcaatttttaaaaccctttatatcgtatacctcttgccgttttgaatcacccatgtgaatgttgaccctgtcggcgacgcgtccatcttcgcgcaacccgcgtttgtaagtaatttaaacggtaatttatggcgtgagtttttcatgggataaatgccactgaaaattccagtcgatcgtcaacgacttcaagcgcaaggctgagatctccgcgtcggccatcagtggcacccatggcgagagcatggaggtggaggagaaggtggaggagatgctcgagtttcgcgaaggtatgagcaacccaaagctgggttttggggcgtagatcagcatcatcatcatagcagctgtgaggcttatgcttatggcgctcgcgcgcagatcaaaggtggggtcacgaactgcgcagctcactcggtaaattacgccacctgctacgggctgtacccgaaaaggggcgaggagtacgaagaagattcacctcgtgggccacagtatggggggggggcaaaccatccgtgctggctcaggtgggcacgagtggctccactccattactaccatctcgttcttggagattggtgatacttcaaggacctccttgtgtcatgcttcggcgactcggtagatttgatctacgacgcgaagttggagcatcacgacgaagcaggacgacgagatgctgcagggatatctcgaccgggtcttctcctgtagtatcttcaagtccgggttcagggatgtatccatctgatgtctctcggtggtagacgctaaggaggagagcgcgtcgacgtcggtcgaaacgctgaacgtgatctactactactacagctacgccaccaaggacacctactagacgtaaaacttgaagccgcagaagatctcgtacacaaacatcctcacggtgctgctgccgctcaacattctattgatcttccttggcagtcgcaatgcaccggacactatggggttctcgacggcctgacagcccaatgacggcgcggtcagcaccatcttcatgagccaggactacgtcggtgacctcgttgagttcgacggctcgttgaagatcggcaagtggaaccagatgacgcagatcacttggccgtcacgggcgtcacgctgctctactaggtcctcgatatctacgagatccatctggagctgctctacagtctgtcgggctcgagctcctctcgtcacccaagctgaacagcgcccatgtcgacgctgaaccctgagacagtcaacatccacacccaagaagacttcgaggtgctgcgcaagaaccccatcaacacacgcggagaactattgcgccacgatgctcagcatcacgctagtgaatgacactatcgtcactgccaccgccaccgtagagtcggctacgacggacaaacgcgaggacttagtgcatactactagtacacgtagtatcatgaatacttagttaatataactattttctggtgttctgttgccctcctacactattctgcttgcaatcattgctgcctctcacgatgtagctagctttctagccatgccaacgttgcattggaaatttcagagcttcctcgtgcgcagcacgactttgtagtaagaaaagtgattaataaaaataaaaataaggggtttacagtattataccaaaatcctcctatcccagcccctagtattatcaaaatatatttcgcgtaaatttctgaaaacatatatttttcgcgaagatttttgcgatcgaaatcgaaccaaatggtttttgcaaaacatattgtgggttctactcaaaattggagtggtcgattggttcaatcaaccgcccccgaatcgccccggtcacaccttgaacaaaccaaaccatgaaacgtgcaagaaattggtttgctcgtaaactacccagatttccgagccaaaattaccgcattcgctggtttgtggtcagatccttccagctttcaaaccacgagcgggggttcggagttatgtggcgttacaggtttggagttactgtggcgctcattggctacaaaaggctatacaaagatatcgcacactttcgtaaaggtccgcatttgttgaaataaattctcgggctgtagaatacccaagtatgccgttaagaattgatgtacgagccacaattaatgagcaccctaagatgcacaagagtttggcacagattttgaagttgctcgaagtgagctacgactagcccgcataatattagatggcgtgggagactagagactatctttaagacacgatcaactttccgggcattcagcgttgttaacactgttctaaagtagcgaattaccgctgctaagcaacaattggatactcaacagaccaagcgtatgcaaacaacgcgtctagtttttttttcagatttacagaacatttcaaaattggcggagctgcactgttgttagggtccctaatccctaacttagggatctcattattaaatccatttacttcttgtggtcatcattgatgacttgatgactcatcaagttaaaagtaaatcatgtaacttggtgactcccgtgaactaaatttttcgtgtaatttgaagctggaaattcttgttgcacgtgccaagcgccaggggaggcagcatcatagacagctattgctagttttgatcctcagcccacgcaaaaggacgacggttgcccccatgccgctttcatgagaactcaaaccgagtaggtgatctattgcgaaattcgttgttgtatttgtgcccactcagtgatttggttcgttgcaaaatgaaatggtggggaaagcaacaaagcaacggagatttgatatttccgaagtcactcagtatttacgaccatactcggttctaatcgagtgcatgtcacacacaaagtcgcttaatctcttcgggtagactacttaggctcacttatttaagatgctaaacactgtcgcgtcattatcatccctcctgcacctactccttcgatgtcgcgacggatgcggaacatgctgcggatgaggaccgcaacgcttgcggtcacgcgtcttcgcatcgaagctcgcggcaggctaaattgttcacgcagacgaacatcagcctcttttgatctttcttgagagacttcgcatgaaattcgccatttccactggtcacggctagtgctttgatgcgatcttgcctacctgtaaacacatattcccgtccagcgctcgaacgacctaactaaatcctccattcgctccttcgtcctggattccggagctccaagttggaataaggggaccgttcgaaggtttgattgggcccgtggcatcttaataaacgggcaaattttgcgtgtagatcccccttgatttatcgagtaaacttgttgaatatctggatttatatactctctgacgtcgtgtctgcctgtgtatatatttttttaccgcaaaagaaagtttgagggcaaatgcccatattatcatgagccggagactggctcaagctaacagtaagcttgcttgcaactactttatctttgggcgttcccgtggtcgcactgatcgaagcggtttctcaatcgcgataattgttgtcgtggccttgccgaagagcacaataacagtgaagtgattctaaccgcgatccattctgtaaaagccgcactgcctgcgaatgtgcagccgcggtgcgctggttcgcaaaaacggcatgcttggtttggagttacaaaatgaaacgtgttcaaaccatgaaaccgattcaaacctggtttgccggtaattttggtttggtttgaactggccgaggtttggtttggtttggtttgttctcggtactatgctaggctattttaggtgctgaatccggacttatacggaatgataaggtatgtcggcgtttcataggcgttttgtggtgggagtcgattggaagaaccgccaaaagtccaaatttggccggaatttacaatacttgtacggtattcacaacgacgcaattccttctttgctttacatcaaaacggaactaaccgatgatagagtcttcaccatcaccactagaatttgtagcgggacttgatgtgctccagcacacgcctcagcatccagccatcgcctggggtgaccgtccgcgaagagccggccttcatgacgcagaccgggaagtcctcgttcggctggtctgtcgtctcgtagaagtcggggaggccgaagccatggccgatttcgtgcgccacgatcgtcaactgctcctggtccaggctcgccaacatgttctccgcgtccacgcgctgcccccagtcgccaccggcgccgccaccctggcccagcgtaggccacagcgacatgtcgaacggcttgcccttgcagccgctcgtgtcggcgctggcagcgaagtccttgtgcttgtagcaggcctcggggcactgcggcacgccgtccgcgtccttctcgctcgagtagatggtgccgagcgagtcgtcgctccagtcgaagagcgaggcatcgcgcgtcgcccagcccacgatcttcacgtcaatctgctcgaacggccagcagtcgtatccgatgagccactcgttccaggccttgaactgccggtttagcatggcctcgaacttggacgccaccgacttggacagcttgttcgtgctgtcccagcggacgcagtacgacagcttgcccttgttggtcacgagctggtcgaagatgtagttcttgaactccggcacgtacttgctcatgcgctgcgtccagacccagtccacgtccttggtcgagatgtaggcgttcgggttgccaacgacgcacttgccactgccggacgtgacgtcgccaaaggtggcgtgggcgccgctggagttgcccgtcgacggggcttgggcgatggacccctccgtggaggcttgcgtcgggagcgagccggttgtttcgccacttgagccctcggtcgagtcttgagccttcggcatcgaaccagtggtgccgccattgctcgactcctccgaagaccccgtcgtggggttttccggggcgtctgttgtcgtttggacaggggagtccggcgtttgctgctcgggcgagtccgtcactgttggcgtgtcggtgtcagggaagtcgaacgagacgcccggcgcagttgtggctgatggagcgtacgtggttggccgcttctttatggtgcatttcgcagccgacgtgatggagctgcaagcaaccagcgcaacggccgcagcgatcagtagtcggcgcgtgaaaatccgtgaggttccgcgagctgccatggtggagaaagagagaatggtgacgaggttggacagattaaaagccgaaccaaggtcgccggtttgcgtacaactgctgtaacgtcggtgcacaatatcgcaaggaagcagtgcgggatcggccttcagcaatgcttctacagtacagtgtacagacaacgacttaacaaagccggtagacacaaaaagccggcagacgaagtcaagcaaagcttaacatgagcaaaccagccaatcagattcaatcaaatgacttcatctttgtataccatctggttttgtgtactttatatgctttattgtgtactttatgcaacacaccgtgtgttttataacagttttacagatttgacgtgagggaatttatcgttgtttttatatacagtaggaggatggcattactgtaagcatgccggctttgtaagtcgttgtctgtacgtgtgcagcttgcttttaggcacattccgcgtagaatactgcgataacggcggacaggtttgcacgcgcaaatcctcaggacccgctggttcaacaatgatgcgagtcgcgaactgacgaacttcgaacagtgcatcgacacgaacagcatgccatcggccctgactgtactgtatgcgctgagtataggtagcacgacaccccacctgaattcgaaggttagcgagtgcgagcccttttgctcattgaattttacattacatgcattgctaaactgtaagtttattaataaaataactgattcggttcgtccgagcgttactcaggccaatcatgctagatgggcaaatacggacacatgcgtgtgtggggtctgcacagagctctttgtcctcaggcaaacaagcatgaaagataaagcaacgatgtgtattattgtagtattataatatattgtgctttgcaatgattttggcgagatttgctgtatttatagcgaccacctgctagatttacgataaatcgaggtgcataaatgggtggaggcctagaattacgctaaaagcgccacaattctgtccgtttttatctacaagcacctacacacacggcaattatgcataagagggtggatgtgctggggatcatgtactgggccaatgcatggctgctgacaggccctccaacttcttaaaaagtattaaaatataaataggggttgtcacgatgctcctattcgacagatttgttttggcgaatcgaatcaaaccttcgcccatttaatcagctaatcaactgaattgtttgtgcccaactcaaacttccctctttttaccgagagagagagacgggccacagcaaaaaagacaatacatttgaagcgatctgattggtcgagaaaccctacggcaaacatatctaaccgtgatgcacccctattacatagtacaggaagatactaatgtttcctgccttcgcagtccttgagccgcaagctacatgccagcgacaggctgtcagcatgttgagtcaactttggaaagtcgtgccaactcaaagacgatcctctacatgtaccttgcgcgctgcactttgcagctcaaacaacgcacgatcggccactgtaaaatacagtgtgcaaccataacggctacggtacagtacagtactgtacccgtaatctctctgactcgtagtctatccagtcaacatgaaatgcgttacctatgcctcacataaccaccaatctgagattggcaatctccacaatcagcacctgagtgatctgtgatctacctcaagctttaagtaaggtcctgccaactcgccagcagtgtgcaagcccatacttcaggtggcttgctatcgtagatcagtaatgagtatcgtgcgtgctgcgacttggtacttaacgcggtaccctctgttcaacacgaagcccttgcgccttgattgtactgtagttttcatcgcgccctcgaatcagcataccacgatccactaaaggtggttatgctctctctctctctctctagagcgcgaatttcctgggtgcaggtgcagatctgcaccaccacgccattagtcgaagaccttgactggaggttgccagtcaaggctactagttgaagacgtgctcagtatgcaataattattattacgtaccgtttatacggtacacatacagctttgctcaatttgtttgacttgaaaaatgtatggccaggtgctcaaaattgaagtctcatcactcgcagtgccttcgaagtcaagtacgcatcgtcgcgttctctgcctaactgcccatttaggtggcaaactgactcctgccactccccaagccgacccgaagagcgcgcagctccaggcagcagcatggcgtcgcagtcgctccccgctccgacctctccgttcgtggggcgcaagcgtcgcatcgactgcgactcacagccgcagaccccagtgcgtcgccgcaaggttagcacctcccgggataagcaagtgttaaagcgacagggtgccggcaattctctaaccaagacacaagacggcaacaagcaacaaaaatcgccaggcacggtcctcctcagcagtccaaccgacgtgtccaacgcttcggtggtggtgcaagtgcaacaagtttgtgccaaagaggcaaaagcaagtggtttgccaatcctttcacttgcacctcctccgaagatcgtgacaaaagttgatccacaacaagaagaagtgtccgaggttgaagctgaagaggaggccgaggcgttaacacctcgcccctcactcccagtgcgtcgaagacccccaccgcggcccccactgagccggagacgagctgtcaccgtgaaccgagcgaggttcggcgtgggcatcgtccgctgtcgcaattggggactcaacaacggggaggagacggaaacagaggacgagagtcccccgtcgtccccaccgagtggcagtgtgggtgtccaaatcagaatctttccagtgtctgccatgcaaccttcgagttgcaaatgttcggacgagacgaaggatgagagtgaagctctggaagaaatcgtgggcaattcgatgttgccgatcgatccgagccaaacgtgcttcgaccccagctacggtgaagaccagtggcagattcgatccccctctccagacgaagagttcgtgcctggaaatcgtgttgtgccggcagtgggaagtgctgaaaaatggtgaagttgagttggaacttcgtgattagcttagcgacacataggttagttgataagtgttgtttgaaaacgaggaaaagtggcaactagagtttgccgtcgtatccgagaaatagcgcggtcgagaagtcgaccattgcgtcgtgtacgcgcttttgtaaggcaacgattttgccgcgtgccagataaaattccttccgagacgggagttcatcgatcgcctttttgaagaacagctcggcctcctgcgtgtccccactgcgagtcaatgccaccgccttgtttgcatacgcgtaactgcagcgagggaggagtgcgatggcagcgtcgaagtggacgagagcgggctgcaactcgttgcgactcagacgaaccacccccagattcagatgcgcgactccagacgacgggtccagttcaagtgcacggtgaaactcggctgctccttgctcgaagttgccctcgcgaaggctgagagtgcctaaacacacgtggacgtgaaccgatagcgggtcaaagtgcaacgcatcgctgtagtcctgtcgagcacgcgccaagttccccatcttctccagcataattcctcggttgagcatgtacagagcgagcgtctgctcgtgtgagcctgtgagatgcaccttgggggctggcgtctccatttgcgccagaagagtggccgctgcactcgtggcgttgctcccatcggtcggtgaggtcggggctagtgccattcccctcgatagccgacgggctccattccgtctaacggttttgcgctccaatgcgttgcggtgaatggttccactcgagaacgcgtaaaaaatattttccaggttggcggaggaagccacacatgtacgcaccgcggcatccatgcaagcgacagcgtccattcctctcccaggcagcacgaacagagctagcgccttgctctccaagcacgtgtggttgagcggctggtcgcgagagatggcatcgcactgagcaatcgccgctcgcagtgagttctccttgcgcagacaattggccaagttgagtcgaacgtccacattcgatggctgcagtcgcgcagctcgcaagtaaaatcgtcgagcgcgttcaaggtacgcagcgtgttgagtttgttcgaggtgcgtctcgctctttgtggccaaattgaagtaagcgttcccgctatcaacgtacgtgtcacgacccagtcgtccataggcggcgaagtgtttggcagcgtcttcgtatcgattcagctgcagtagagcgaaccctaaggctccatgcacttcatcatcgtccggggcgctctgttgaacctcttccagatcctccagcgcgttatcaaagctccccaagtggcagcgcacgatcgctcggtttcggtgtgccgcgacatcgcgacctcgaccaaatagcgagatacattgactgtacgatctctcagcttgagaccagagctcgagcttctggtaggccacaccgcgattgaaatatgcatacgcgcgcgtctctgcgcttgttgctgcttcgagcttgatggctttgtcgaagtcctcaatagctgcggcgtatgcagcgaattggcacttgagcacgcccaaactcacgtgagcgcgggcgtattttggctggcgctcggtcgcagtctccagatcgcggaaagcacggtcgtactcctcgcccagtgcattcaactcggcacgatccacatacgcgtccgcaaggagaggctccaagcggatgcatctggacaggtcggtgatgctgcccacaaagaactgcttcatcatcttgcgtaccagcgcttcgtctttcatggcgtctgctcccaggtgtctttccacttcacgcgctgtgagttgaggggcgaactgcgagcgtgacatattctgcactgcattgggtactccgacagtgctcgaagcgaagttgagctggaacgcaacgcgccaccgcatatacatctgcatctgcacgacgccacgctcgtagtacacacgcccctcctttggtgctagtgcgatagctctgtcgtactcggacatagcgttggcgagttcccccacggacacgagcagttgcgcgcgacgcgcgtatccgcggaagctggaagggtccgtattcaccactttgtcgctcacgcgcagcgagttttcagtgtctcccagcgagtgcagagactcggatagcaacacaaggttctcgctcgtaggactctcagcaacggcctgctcgaacgcatgcactgcgctctggaagcgcgagaggagctgatacgctcgtccacagagcagtaaagcccccttactgtcagctttgggcttgctatccttgcttcctttagtgtccacaggaggtctctctccttgacggcttgacggagggtctttcataacctgctcgacgaagcaaatgaagctgtacagtgctgggcgcgccatcttgagcttcagcaggagccgtcctcgtagcaggtgtgcccagcgatcagtaggctggaatcttgtaagacgcgtgtagtcttgcagagcggcagtcgtgttaccttgccgcgtgtacgcctcaccccgcacgtagatggcacgggacagactggcgtcgttcgccaacgcgctcgtacacgccttcacggcttcttcgcagtcgtggtagttgttcaggtagaccaaggcgatttgcagccacacctcggaaagtgtcgggtctgttgcaactgccgccttgaagtcttgcaacgcgttgttgaagcgcagatctcgtaaatgcaatgcaccacggactgtgtacgcaccagcgatcgtcggatccagggaaagacaacgagataagtgttgcatgttgttggcgtggtgagcagctgctgtctccgcgtctttacctgttccagtagagtccttggaaagcagcagcgtcgcgaaggcgcctcgatagaagtgggcaacagggtaatgatactccatcaccacggcgtgatcaaagtcctccattgcgttgactttgtccttcgagagcacgtacagtcgtcctcgctgagcgtggatagcagccaccaatagttcacggtcccccgtagatagtgagcgatactctccgttcccagaggaggacgctccacctaagccgctgctgttactcggagtctgtggagttcgtggcatgccgagtccaccgcttgggtcaagcacgagtaagtgaagtaaccgcgtgagattttggataacttgtcgtagcacagtcgcgtcccccgtgaactcgagaagacgaaccgtgagatcgccgacggtctccacgacttcaaccaatgtgcagcctttgtgaagtgcgttcacgtagtcttggatgatagaggccaggagctcctcgtagcgtaggtgctccgaatggtagacaaggttttgctcttccccttcaatggcgcgtaatcttagcgttgcacgatcatagtaagctcgccagcaaccccgatccaaagccagcacggacgtcaagtcttgcaacgccgcaccaatcgaacgccctcgatggaaaatctccgcccgtagcaacagcgcctccgtgtactgcggatgcagcatcaacgcacgattcacatcagccagcgcgttctcggcgtcgcctattttgctgtgtagacacgctctcagcaggaagagacgctggtcttccggacgcaacagcagggcgtggctcaaatccttgatcgcttgagtccaaagcccaagtcggcgacagcaacgcgctcgaagcagcgcagccagaatgaactcgcgatcgatgatcacgcacgctgaggccaacaggatcgcgcgcttccagtccttctctgcttctgacagtaaagctttcaggaacaactcgtcaaccgtcatgtgctggtctccctccttaaggtaagcggccaagctctccacaaggtcggacgccatagacttgatcgggattcggttatctaccgtcgcggatctggagtttggtcgatcggacccacgactaatacttgatgacccaggccggcgttgcaaggctgcgtcatcgcgcagcagcacctcagtctgggcaatcaccgacatctcttgacgcaagaacgacttcatggctcgttttgcgatgacgtggcgacagatccgcatcatgtgcgccgatgttggatccagcttgacccgcacggggatggcccccacctcgtcttcactaatactcgacacgtctgacggccgtcgccgctgcagtttttcctttggaggagcgagtccctgcgcgggggcagcaagttgcttcccttctccaatagtcctcagcgatggacctttacccaagttttgagcgttaagcgttgggatacttgcgctggacatcaaccgcatccgatgggccgtttgcgtaatcgccttatccacggacgctagtcggtggagaatagtcgttggccccccagctgaccccgccacttcctcggtcacgctgtcaataacgcgctccagcgaggacttccgagatcttacgctgctgtttgtaccgatcgctggtattgagagttttccgaagctgctggtacctgctggagccatggcggacactcgaaggacgtgctgctcggtctctcgaagctttcgggcgatgttgctcacgtgcaagtacttgcggaggataacaccacggaagacatgttgcgtgaacactgctggctgtttgtccccaggtttgcggatcacgatcggggttgcaagggatagacaatcatcgcttggctctggcttcgctggttttggttcgatctcaaatgtctggacttcttccacgatgggaacttcgaatccactcgacaatgaatttgagtcggttgaatgcgaaggcggatacgctccttgttcacttcgctcgtcagtttttccaggtgcagaggaagggggtgagagcggctgaaggcggatcggaggtgtccccggaacaggctctgataatggaggatgggaatccaacacagcccctctcaagctggttccggcaacgtgtaaacttgtcgccgtcggtagtatccccaccgacgaaggttcaacgttcactggattgctgcccgctttactggaagtggacgcgcttgagggacggaccggtgtcgataaatgcgaatgatcctgggtttgggtcgcaggagttggcggctttgacggtactgctggagttggcggctttgtggaggtggctggggttgtaagtcccgaccgcgacgtaactgggccatcgaagaggtagtggttgttctcaggagtagctggggctggagcgttttcttcattccacggagctacccgcgactcattcgctgcgtcgtcagaagcgaatccattatcacgcgttccacctcgacttgatggtggcgtggagatcgcatcgtcatctccgagcagctctggcgctcgtgtatcaaccgcagccttccaactgttttgccgtcgctgagcacttggagaaggcacgatcgggggaggcgcggcaggcttgctctgcgcgtacacgggaggagacttcagcggggccatcgactgcggtttccatctgaaatacttgggcgtatccgatggcgtcgggacgtacggtcttttaactgggcgcgggctgaatacggcggggagagctccagcaggcagaacaggctcaccactctggctttcactgtcttcgaccccacgttcgtactcatagtcgtcatcttccaacgggtgaagtctccgatgcttgcgttgtagtttctcactctcctcttgggtgatcacccccagcggcggtcgctgttgggctggccggacgtcgaacagcagggggcgccgcttgagcacggggtccattgccggcaatgagcacctggaaggctactaaaggcattattgagctaatggagcgtttcctgccgttttcgagccaccaagagtcacctaaatgcaagcattcatacacgaacacgacagtccagtcaggcggctacaacactggcagatcagacgcaagcagtggcatgtgaagtgacgaggcgaattattcatctaatttttgtgtgcatttgtctagcgtacttgagtacagcccgccaccgcgcctgcaaattcatcgcaagtcggcattattcatcttctcctgcaaatttgcaaggcatttacgctgcaattcgataccagttggtcatcggaacccgaaacaaacaagggatatagcggtcttacctgccacggtgtcagtcggtgcgacgagtcgtaacgctttgaggcagtctcgagaatctgtggcgaccacttgttgcacgccttgagtaaacttgagaggaagaaatccatctcactagggcggtgactctcgcccatgtgctccgtgaatcggttgagcatgtgctcggcgccagcaatgtccagctgaccaaggcgacagaggacagcattgccgtacgcttcatttgcaaggtcgtactgggtgtttacacgtcggatgtccccaacagcctcaaagcacccttccgcggatgcccacaagccagcttccgcgtacacactggccgcccacagtccattctctacagcactgtgtacactgccgccggcttccgcgacattcttggcctgcacgtagagctccgccacctgctttgccagctcctcggtcttgcaatcggtcgggaacctgcgcttgagcctcagggccagctccgccaacccgcgcgacgcctcgtcaaagtacccggccgatgccaactcgtcacacactccccgaatcttacgcaccaactcgctctgcgtcttcgggtacgtgtcgacctcctccagcgtgcaccaggcggcctccagctcgtagttggctctcagcagcagcgcccccgtcgctttcgccgcctccaggaaaaactccgctgcgtgcttccagtccttccgcactttgcactgcaaggccttggctctgatctgtcggtgggactcggtctccacctcgttcacctctgaatcattaaaccccgtggtcgctcctgctgttctcctgcgtctcacagctccgtcgtctctcgccgacgcggacgtcgccccccttaccatatacttctcaatgctgctcatgactccacccctcgagactttattcacccacggggcgcgacacagcgccttgacgtagtccccggcctcgtcggcccagcgccacgtgccaaaaatcccaaaggcgtagcgctccctcgacggcatgaagacgacgctgaaggccagcacgttgtggaagcgccagacgagtggttcgttgcgcaccagcgcctttgccgtctggtacatggccgagaaccacttggacacgcccagggacgcgtccggcacgaggtccgccggctcgttctgttggctgagccacagcgcgaacgagtggtccgacgggttcgtggctgcggcgaggagcagcacggccacgaccagcgccagcaggcggagcagcgtcgcgaccagcacgggtagcagtgtagccatgaggaacatgcccagcactgcaatgcaacagaaggtagaggagtttagagggctgtaacgttggctagagagggagagggggcggtggagacgcgggaggcagcttacggatcaggaagagagcgttgttggccgtcatgggcgctggcgccgccgcgggcgctgcagtcccccacgccatacttggcaggaatatcaggttgtgaattgcgtcaagtggtcactggagtggggaaaattgtaggagaggctttagtgacagggtaaagttgatgttgaagtgaagtttgtgagtgtcatgatcttgatgcacggaccgcgttaaggaccacgctgctgaaggggacatgtacgctcttgacactacatgtagttctcagcttgctgagtaagtattgcgaaatgtgtctactaaattggcaatggcttcgtacaaagcttacgtaatggacgggttccatcagtagtagggtagtaatagacagaggacagaatgacggggttgactccggcgccagaaacgaaaaagcccacaggatcttcatttctgcattgtcatgtcagcctcatcaaagtcctcctcgtctccgcctgcttcgccgccatcgctggctgaaccggcgacatcgaccgcccctgctgacgcgaaagttgaggccaatgcacccacgggaggtgacgcagacagcgaggccagcttttgggacatcatcgccgactcccacccggatcttgagagctacatagaccctcagtacagccaggaggaggtgaactatcagcccgccatcgacacctctagtctcatgggcagtgtgatggtgccatctccaagctactacgtcaccgtcgacacacgtctggatggaacgcctttccgtacgaactcctgcctcagtcgtcttcacccttttggcgtttatttactcgctgatcttttctatccactcttgttgtgtctgtagcgctgtcgaagccgatctcccgtgaggatggggctcttatcgtgggcacggagctcgtgggcacggagctcgtgggcacgggggaaaggaatcgtatcttcacgacaaattttctgagctcgaacgatccggtgacgcaaatacaagtagaacaggtgctgtatgcttcaaggttttgtttgctcttcagattctaacattgccgaaatatttggcttccttcaggaggttcgtgacctgcaatggatcagttcagacgtcgctgttgctgctgtcggatacgatatccagctgatgcagcttgggcccctgaggatgcaaggtacgaacgaaaaagcgctctcaatctagagtttgttcgagctagcaattgatcttagagcatttgtacctcgtgttacagccccgatcagtagtgtccactccgatgctattcgagatttggccgtctcaaccactactaactcatacgtgctttctggtggtaagttgaggacatactgttcaagatacctttgtattaatggattttgctggctttctccaaccagggtttgacgagactgtagtcatcacggacctccgagataccggagacccgacagcttcaacgattgttgcaaagtacgacgcacgagatgtggttagtagcgtccggtggtcgcctgtgggtgcatcgcaagtgagctggaccacggacgggggtgattttcaagtcgcagattcacgtgtaccgtcgcctcagctccaaatcccgctgtacgcgtatctggtaagcgtctgtccaccttacacattagatgaacattgctaacgatctacatactctgcagaaggtcgataaactaggcgggctatttgcacatgaatacctgagcaacctcactgtcgctctgggattcgagagcggatacgtcgccatgttggacctccgccagcctcgacagtcggcttgcacttcacttgtagagtcgaagctgacggcggtcggtgagatcagacgctcgggcaccaagcttgcgatgtttggtcgcagcgggtacgagctatccttttaacctattttgttggtatgagagagtaatgttttgtcgttgcgttgccaggttttcaactgcaggactgaacgacggcagtatgagccacctcacgctgtgcgtagtggccatcttctgatattctggtacttgaagtattgtacagtaccaatactgacgcggtcatggtgacttatgatatgtaggcggcagcaaccgacccagattgcggcgagttcctacaaaaccagcggtgacttctcgttcgaaagtggcgcccacctagcagtctctgacaagtacgtaccaagtcgtactgagttttaaagctagaactacagtgctgacatgtattgtggtagtatgggtatcgtgtcagtgtacaaggagaacgacatcttcgtgccatcgacggcattcaatgggagtggagttgacgcctggtaaaacgatgcacgtgcgaaaagcagtgcgtcggttgatgaatgttacagaagcaatacatttacaccacaccgttgaatctccatgtatgtatagtagtgttttacttctacgactatcgagtgtaaatgggcatatccaggtcattgctatagggtacagaaactcggaaattgaaggcaccccgcaagcataaagggaattcatttacattatcgcagggaaatctagtggtgctgcatgcgcgagatttcttggagcagcttggtgagattactctgcggctttaggttggtgaagctgtcgaagtgtgaccaggagtagccgtccgtgtgcgcaacatcactcgttgtgtctgcaaaataaaaaaaataatagtgtcagtagaagcaatacaagcacgtcatatcgcaatccatatccacatacctgggttcatagcaagctgcacacgaccaagagcgttgcactcataccactccgtctccttgctgcgcgacttgttggacaacccgatcatcgtggtcgccaactgcgtcctcaaagcaggagattgcagcgtttgcgaaaacttcacccgcgtcggctgggcgagctccgcgagaccaacctggatccgctgcagcgcattgacctgttggtccgtgcacagatataacatctcgatcaggcgaactgcggccagacacgtttgctcgccttctcgctgcaggaaaagcgtggcgcctccatcttcgccggcgttggcgcttttcttcttgggtttgtcaccctcatcatagactcgcttccatagctgcagagcccagccgatcgcttgaaagatcaagttgttgttgcgcatcttgttggccttggcgcgcgatttggcgcgagctttggcagagctcgatgtgctagcgccgtcgctctgcaacagcgcgaacaatcgcgttcgctgcacccacgccttcccttccagtcgctcataccgcgagcggcacgcatggagatcttgctggaagcagtagataaagaactgcacgaccagcaagttccggcgccagctctcgtccttcttgggcaggccgtcctctccgacttgtccgttcccgctgacttcctgcaacgcggttcccagcggctcccactggttcgggaaagtcaaatcgcagctacacgaagccgccttgtcgaacacaaacaccaacgctgcgtagatggccactgcgtcgctgtaggcaatggcgtcgtggctctggatgcgatcaatgagctcggcatagagcagatctgacgggtactctttgccgagcaccacgatgctccggagagtagcgatagccacccccgggtcgttcgtactcagcgacgtcaccatgtcgaacaccagcgacgcgttcatggacgacttgagcgtcgatgacggcgtgatgggcttcagctcgtccggtcggcggacagggggcgtgctaggcgctgagaagggcctcgaagtcgcacggcgcttggccgctttgtccggcgtcttctcgggcgtggagaagtagtcgatgatggagcgacttcgcattttcttgcccttagcgggacgtggcggcgtcttggtgttgttgttattgttggtggtggtggtggtcttggccgccttcttaagggcgctagacttggaatcagagtagacggagcccagcatctcctccagcttcacgtccgtgtcgctgtcactgtcgctgagaatgctggcgagcgcgcttgaggcggcgcgacgaggtcgagtggagcccttccgtttgccatgctcgtctgtggttgaaaggggattgtcaagtaagtaggaggcgttgtgggggttgaagggtatgaggagagagaggagagtctggcggttcagatgaggctccttggacaggcagacgtaccgtcggagatgaggatgaccgcgtctgccgcggtgtccgccgcggcctcgcgcttgaccttgtccgtcatacgttttgagacttttgacgcctggtatgttggaggtcacaatttcaaggtttcatgaactcttttagtggcatgtatgccactttagcggggtgattgcagtatacttagtgacatgcagggcacttcaacattttcttcgcaagcatcgactagtgtcagctcaacgagtggaaggtctgtcagaaaacgccgacggtccgtaagggatacaactgcatgctgtgcgggagcttcgtgtgcaagttctgtcgcgtatcgcacaaaatcgcagacattggcccggacaacaagctctactggaccaagcgcgtgtgtccattctgcatgacgcaagtcatcaagtccgacacgaccgtcacgatgcgctccgagatcgcggcaggcgagtacccggacagagataacaaggtcttgtagttgttggatgaaggtagcggtagttggtagctaggtggtagatggtgcttatgaatctcagccagtataaacgtaggaagctgtttcactgagtggcttctagacattgtccctgtttgctgcgccttgttgatgcgaacgcaacccacacgggacaatgatccgacagctcgtacccgcactgaacgcgagacatataagtttgcagtcgcggaagcatcgcgtccatcgggttctgcacggaaagacgactgctctttgaaggagggtagtatcgccaatccacgcggaggacgccgctatccacaaggtagtcgcgctcttgttcttcgcccgggttattgctgctactggtgaagtctgcacgatcgagccaaatattatcgtaaagttttccgaagaccgtggttgacagcggtgagcggatcagggccatcttgtgcgaccccagactacccagcacgtcctgcggcgacaagttgaagtcgcccagcaccaccactttcctctctgtgccaaagttctcgctcagctccgctgccagtcggttgatctcgacgatttcggcgtggcggtcctccttctcaccaaaggagacgtgaacgttcatcaacgcgagctccagctgcggtaatttcgacgctgccgtcgctcgaaaggtggcgacgcacggtagtcggttgaacatattcttgtcaccttccaatagccagcacttctcaacaagatgcacagcactccgcctgtaaaagaaagcatagcgctcaacacgcttcttcattcccggggtcttgcgccccaccggctccgacaccacgtagtcccacccaggcagcatcgttttgagtctcttcaacacaatcaagtccctcacttcctgcagcgccacgagatcgaactcgtccagcacgtccgcaattcgctccagtagaaccgtctccttgcgtcttgaaatgttgcggatgttccagctcgccacgatgagcgatcggttgtcacacccgttacaattccacattgaaaacacatttccacgcacgtcgctctcaatctcccgacaaatgtgaaagtttgcgtctcgttttaccccctcttggccacactcgacaccgtcttcaacctcttctcccccactgtgttcctcgtaggaattcactttcacttgagcccccgcttgaattttcgcgtaagactttgccccgatgcctttcacggccagcaggtcttccttccggtggaacggcctcgcctcgacgatccgtttggccaaggccggccccacccccttgagctgctgcagttgcctcttggacgcagcgttgaggtcgactttagtgggggttgcattggattcactgcagtcgaccggccgtccacccacgcacacttggtgctgggcagtgatggccgccaacttgacggggccgatgcctttcacgcgcagcaagtcgtcgacgcacgagaaggggcgagactcgacgatcagccgcgcggtgacgcagcccacacccggcagctgctgcagctcgagaggcgacgccgtgttcaggtccatcgagccgagcaggtaccacctaactgcaacttttcggcccgcactcccagcaattttagcgttgtaggtcacaatatcggggttttatgcggaaatttagtgacagggtagaccacttcaacttgaccttttcaggggttgacggcgttcttacgtggggagctggatgctgctgtcgctgtggtgctagacgaactttcagcagccagtgtggcgttgagtttgtggcggaagacgtccgagtgcaccacggccacgtccttggctgggtcgtcgatgtcctcctcgtcctcgtcttcgggaacgcccctgggtgtttcgcattggtctcgccttcccgcgccggccataaagacgtcgacagattccagttcttggacgtgatgaggttacggctgtctgctcagtcactgtgatggtctcaggcaagcgccgcatgggagttggtaccagacataatttacactaagccgtgctaaagcacggagaagctctggattttatcatgtagttttgattctaggtttgattctaagttaatttatcttaaatgtgcctagcagttctacccgaggttctttggttcagttggtgcttttgtctttattcgggtttgctaccaagttccgaaaccatgaaagcatgcactgccaactatctcaagcccttacgcgagcatgtactggtcactcgctatatcttagctatcttgcaataatatgcagccacgtcaaggcttgaatgcggcggtaacggtacgtatgcacgtgcagaatggttgaaacgagtatatgcagaatggttgaaacgagaccagcatcgtttgaagacttcaacgacacccacgactttaaattgaagtcgtgggtgttcgtgggtgtcgttccatgacttgaacgtggcgacaccgatgtaacatcgttgaacatacatgtactgcaaacacaactgtagttatgtttggagtcatggtcgagcgacatccgatcgatcgtgtcacgcgaatgtcgaccctaaaagactcaagcaacacgccgctggataagcgtttattaaagttaacgggtacgttaacgatccgttcgtttataaccgatagcggagcatggattttttataatgattgcacctgcagtcgtatcgcccaaacaatttggataaaatccagagaacaggtcttgtaatcgggtagggggttctaactctagactgctctaaaaagaatcactggcttttattcggggcagttactgtattgcattcagaaataggtgtccgttatgtaaacgtggtgtggcactatatcgctgccgggaaacgtttggagtgcatcgatcgaaacctccgcgtccacgatggcgtccgcaaggtaagccccgctccccatcggcccctggcgcgttcactcccgtgcccagcccattctcaccctcgcattgttgcagtcgacccctagctaccgcacaagacgacgaatacttcccgtctttcctcacggcgcttcagtccacgcccaaggccgacaagtccaaggagagcgtcccccgcacccgatccgagacggatgtgctgtcttccaaggccaagccgcgcctaaccttcgccgagagcctgtccatgaaccgcaccaagcagcagggcgtggaggtgcccgaggattccccgttcagcttcggtggcagctaccaggacagcctcggcgctcgcaggcgcaagggtggcccctctcaggacgccgctaacggcagcaacgctcaggacgaggacgtgccgcccccaccgacgatgtcgctgctggaccccgtgggctttgcggccggatcacacagcgtggacgacgacgaggcggcagcggctgcacgacgcagtgctgccgcagcgagggcctcgtactacccgaacgcgcacagtgacgagtggggccaagacaagcagtactgggtcaccgtgtttgggttccagtcgagcgccaaatccttcatcctgcaccagttccagtcggtcggcgaggtcgtcaactattcgagcagcagcggcggcaactggctgcacctgcgctaccacacgagactacaggccgagaaggcgctaagctacgacggacgcacgctcgcgaacaacatcatgatcggcgtcaagaagtgctacccgttcgaccgggacgcgaacgcgctcgatgagacgcctgtatctagctactttggcgcgcaggcgcgccagagcttgggctctcgtgacctggaggtggatcccacggacgtggatattatgcttcccccgcgccgccgacaggacatttgctcgcggcttctgagctatctatttaactggtgacacagttgtcatttcgcattgagaagtggtgcagcacagatgcaattgtggagtagacacggtggactgataggcacacaggacagcgaaaacaggaccaacagtatggacggcagtgcgttcgaagaggactcggtggaggacgtacgcaagcagtctgcatgtatgtagacaagcatcattgtgtcgggggaaactcgcagtcccgggtaggatacgagttggaggaagaactggtgaacttaagtgaccactgccctgagaatgtctcgttgttttttgctgcgctaaaattgatccgccgccaaggcgctaacctgtatgcagtaaggtatcttcgtccagctcgcgcttgttgcgactgagatcggcgtcaattcagctcgtccttgcatcgtgcagcccaatcgctatcacacttcttcgaggttgaacaggtaaagcaacgtcagcgcctggtttgtctgaactgtttttttaacagttttcttcgttatcatagaccccattaacagtgtacactcactgagtgtcactcagacacaattcgggagcttgccgtctcgcgcacaacgccatctcacgtggtttctggtggtaagttggaaattcagagtcgtgtcttgattttgatttcctcaatgctgatgaaatctgtgatctttctaggtttctgcggaactgtggtagtgatagatctccgggaccaaggctgccaccatcattgacgggcacggtgataaatacatgtagcatgggtatcgtgtcagtttacacggacagcaacatctttggaagtggaagtggcagctggtgaagcgccaaaggaagttagaagaaaacgatatgaaagaaaatagtaagttcttcatttgcataactgtcgcaagcgcatggtatgttttttttagtactaattaacgaaacgaacttgaagcaaaaaaggtgaggtacgtcactattagggggtaaatatgggagttagtgacagcagggtgcatttgctaattcctcgagtcggcccgtcatggcggtcgccggcacgcagacgatcgcgggcgtgcccgtggagctcgggcaacccgtgcacatcaacacgaagaagcagctgcagcgccagatcaactccatcgtgggctggaacgacctggaccgcgcgccgataaacgtggcgcagaccatgctgcgcggcaacgagcaccaggtgggcgagcacccgtacttcgtgtgcgagaagtcggtgggcgtgcgctacctggcgctgctggtgcagggccgctgctacctcatctcgcagaactacgacatccgcgaggtggcgctcttctgccccgtgcggcccgaccgcctgcagccgggcgtggaccgcaacactgtcgtgccccaccagtggacgatcctggacggcctcatggtgtgcgacaaggacggcagcaagtcggtgctcacgctactgctgtacgacatcctggcgctcaacggcagccccgtcatgacctccaagctgcaggatcggctcaagctcatccagaacgacgtcgtggggccgcgcaagcagctgccgccgcccaaaggacagccgcccgacatgttccagctcgtgctgcagtccatgtaccccatcaaccgcgtgggacacgtgatccgcagcattctgccccgagtctcgcagacgcggcagaatgcgggactggtgttcacgcccgtgctgctgccgtacacgccagggtactccaaggggctgttccattggacgccgacctccatgctgtttgctgacttccagctgggcgtggagtggcgaggccgaccgccgaaaccgggattcaagctggtcattcatgacaagcgcacgcaggtctttcatgactggatcactttcgcgccgggtgagtttctttgtcttctatgtctgggtgtacggaagcaacaggcagcttgactcatcattggtggaatgtgttgcaatagacgacttcgaggcctttcggcaggacaagaaggcatcatcgcgcattgtggagtgtgtgtacgaccctgagtggctcacgtatatcccgtcgcacgacaaaagcacatgggactccggcagcacggagtttaacgccacagacagaggagttggatggcgaaagggtacgttgaaatcgtgtggagctgctggcatttgttgatattgtcttctcacgtttgatacgtcactcgtcttcttgcgaaggcggttggagatttattcgatgccgtccagatcgcgggatgccgctagagcgcaattttctgacgatgattgagaaagcggttggtgaagacattaaactggaggagatcgagcgatttttccccgatgacccaagcaagaagccgatgtcgtcgcagcagaagaatcgtcatgacaccccgtcgacgtcagacgtaaggcttcctgaactttagttttgatatatttccatgaaaatactgacactttgttaataatgaataccggaactctacaggactttgccccacctaacaaaaagaagcgcggtggaggtggagcaggtgggagtcaaggacctggcacaggcgtgtgttacgacttccagaacaagggtgtatgtcaacgtggtcggttctgccacttctcgcattgcgcttgcaactctacgtgttcgtgcacaccgaccaagaatacttacggtacacaacttctggttttgagagaagatgactggtatgtgaagctaacggtttgcttgttttcaggccaacgaccttcttacaggagaaacgactacgatgctccgccgtctcctgaagtaccgccttcatcgatcgctgatgcaagttcagcacctgacaagtctccatcgttacgccacacaaattcgttcgagcgggattcgaagaatgatggggccgcaggagaggaagaagaggctggcgagttgaccgacaacagtgcgttgcatccctgcgatggctagtgtggtgtgactttccgaaactcatcttttattttgttcggaattgctagacaacctgcatatcaacagtatctacgcgcctctcgagaatttcgctaaggagaccattgctgcgaagcgcgcgcagttggcagcactcggaaatcgccgcatctgggcaagcctcggactcgaagacaagccacagcgcactcgaccttgcggcttgattgtgtcgaagacgggtgaggtggcatacgtccgtgcgttggagaaatagctgcaactgcagcttagctggcgtagtggggagaacatgcagtttccgcttcattacttacgtcacggaatacaaatacgatgagtgcgttgctatctggagttgtgtttgtcgacgcgtccgtgctacaccgatctactgctgcttcggtgcagctttccgcggcaagtcttcaaacaccatcgtgccgtccttcaatccctgaatctcatccttagtgagaaatcggccgccggggccacgcggtcgccgcatagcgtgtttgtgacgcgagtcgtgcagatacgccttgcgctgacgagggtttcctagcttggcctccagctttgctcgctgctggcgacggatcataatgcggtggtactgcttggcgttcacgtagaccggctcctcctccgtcgcctccgagttgggcgtcgacgggcgggggaacatcgactgcgacagctacagcaacaacagaaaaacacgattaatacatgtccccacgttaaggcggatcacctttacgcctcaccatgtatggctgcatcatggcgctcgagttgtacatggcccggagctgctcactgttggtttgttgctgcaacgaagagaaattaacacacacgtcagccatttaatgttacgcacaggtcaagcactcccatcttaccatctacatatcacacgttaaaaggcagcggcgtcggagcgagacggagaaggaagaatatcggggtcagcatccacacactgcaagagtcaaaacggtagagcagtcggagccttacgagctgctggatgtactgctgctgttgctgctggaagagcgcgagctgcgcctgaaggtcggcctgggacgcgtcagcagcggcgctggacgcgtcgttgggcgtcgtggcggcgtccgagtcggtgaagaccagcttcgtgtccgtggcggcgttcgtagtgtcctccatgttgctactacgcgcagcataagcccatgcagagacggtcagctcttccagcatggctcctacccacttctagcgcccagatacggcgcgctcgcgagtatctggcggcgtacatagctacattaccttctggtggcggcttcttcgggcgagttccggtaatgagcgcgggaattcggtttgaacagagtggcgtgctgggattggtcgaaaatagatgtacatagattgtacacaaaacagcttgaagcgcgaagcgacacacaacaaagtgagaccttggggcggccatgagaggcgacgtcaaccccacgcagatccaagtgctcgacggggctgccctggtgggtatttgctgctgggatggaatatgttcattgtttttttactgactgtttgtattgctgaacagagggcgctctcgacggagctcaactcgagcaagtacgccatcgacgcgcacaaccgctcgattaacgaaatcggcaacttgtcggaggtgcaatcaatgcgcttcttgtgcccggcattggtctgccttttgtgatttattgatgcaatttgtcgctgtttgttgcattgcagctaccgaagttgtgttcgctggatgtgtcattcaacaagatcacatcgctgcggaacgtgagcacggccagagagttgcgggaactcaagatctacaacaacaagctcactaatactatcggactcaaagcgtaaggctatggtgttggtggttgaatagaatttggcggtggggcttatctttcttgctggtgaagcaattccaacttggaaggcctgcagatgaacgacaaccagattgaagagatctccagcgacttcttagcgctgggtagactcaagaacctgtggctgaacggcaaccgcattgcctctgtgcaaaaccttcggggatgcagactgcttgttcatttggatttgggtcggaaccgtctgcaaggtgcagcatccgaggtgcgtctctgcattccatcgtcttgaaatgcttaccaatgattgttctgcaatagggactagatgcgcttaccaacttgaaacacctgaaccttgctggaaatgagctctcatcgggtggcaatctcgcttaccttacgaagctggaggagctgaacttgtcggagaacaagctcacaagtttgcaaggcatcatgccgccgaatctgcttgtaagatgcacggaccttattttatgccgttggggttcgctgacaacttaaactgctttgacacctgagtaggtgcttcgagtgaacggaaatcagatttctgacttccaaggcatggcaacgccactggaaaagcttaacgagctctacgcccacgacaacatgatcgtggacattgaatcacttcctactcgctgcccacagctggagtctgtcgatttgagaaataaccagatcgcttcatgctcccagattgggattctggctacgtgcgaggggctacaagatatttggttgcaaggaaatccatgctgctattcgagcaggtgagcagcttaaaccgttggtagcaaggctggcagcactatcgcgttattgacgtgaagttcttgtgtcgttctgcccagctacctcattgacgtgatgtcggcgcttccagagctgaaaacactcgatgccttcactgatgcgcaattacagagccaccgcgataggctgaagaagggtcttatctctcaagaagagttgcttaattcttctagagcctcgacacccgcatatcgaccagggtctgcggcctctcgttcgggaagtgcacgcgctcgaacgcccagcgggaggccggcgacgcccgactcggcccctgtttttcataccccttcagctcgaatcggttggtgtttattatcgttgagtactgttatcaggaactaactgacttattcctgccgtctgcatgccaaggcaacctcacgaagttaaccagtgaagacgagctcgtgaaggctcaagaggaagttcgcaatcgtttgcagaagatgaagcaattgttgcatcgcgtggggagccagactgacgagtctgcagcacccgacaagaaagagcgggcggaccagccaaagtctattcaacgacgtacctcggcacctgtagaccccattgcagcagccatcgcagccagaaaacgcgactccgcgaccaaggtgggggctagaccgcatgacggtcgtaatcctacaaagctcgctccgtcgactccatcgcccacaacgtctatggatgctgttagtgagacagagcggattcctaaagtggtgcatcgagcgaaaaccgtgcagtcgctcatcagaaggtcatgtgtcgacgcgggtacggacccccttgagtcgcttatgagtcacaacgagcccgtcggtattcagacacctgggcgagcctgcgaaatggaaacacagacgacattgccaccagctccactcctttctgcatcaaaatcgggctctcttcgtgactcggagtcgagactacctcaagccgaacatgagcaacacgagcagaacaacgaagctgataagacaccagatgaatcaggaagcgagcccacgaaggctgactctcagtggggccctcagcaagacggcgatgcgatcgaggctgagatgaagctcttccttatgcagcatgccatggatggcgcttctcctgaagacaaccaagtgagagctgaagaacaacccgaggaagatgttgaccccgccaagttctggtcagactctcctcgactggatactatcaagactgctgaactacgcaagcccccgacgtcgctgtcaaggacgggctaccgaacgtttcgaatgccttcgcgacccagcagctccgatagccttcagctataggagcaggacgcccttcaataactcatcgaatgcttcattcatatcattgaattctcccagaagagaagagtcgtgatgtgcttccttttactgcgtttgatccgtggtgcgcatgggtctcgacttgcgcacagcattttcgacgtatctaaccaccacaacatccatattagcagcactcttcgggcatctaatacaagtcgtctgcatccacctcagactccgctcgactgcggtcatcttctcgttaagcacggcgagtcttgtcttggcgctggtatctgtacacgcgcacaaaggttactccattggccatgagcgagatcttaaccttgtagcgacgaagaggcgtacggaatcggttgatgaagtccacaacgtccagcagctgcagctgcacgcgctcaatctgctcagccgtcgcccagtcctcgcgtagcaccgtcgccttggtactgtgtcataccatacatctagccccatgagaaagagagaagccaactgcaggcagcagcagcatacttacgccatccctctgattggtaggatgcgcaagcagtcgcattgaagttggcagagtgatggtcactctcccctctcgagtatctaatcattcttcaatctaagttttaccgcgtcaagctcacacctccgttcatgtggcgcgcggtcgctcgtccccgctcatcgcccgctgcgcgcagcttccctcgctcggcggagcgctgggcgtcgtcgacggccttcgaccgcagcgagtacggcctcttcgtcgacgggaaattcgcgtcgtcctctgcgactggcgacgactcgcgcgtggcggtggagaaccctgcgacgacggagcggctcgcgtacgtggccaacgcagcggctgcagacgtggagcgggccgttgcgagcgcacagcgcgcgtttgatagtggcgcctggtcgcgggcctctgtcgctcaccgagccgacgtcctcaataacatcgccaagacgctgcgcaagcggatcccggagttcgcggagaaggaaagtctgcagactggacgccccattcgggagatgcgggcgcagttgacgaggatcccaggtgggtagcggctgaaagggattctgggcgagaggaagctgtgggctgatgttgcattgcttctgatgtgttagaatggtttgagtactttgcggctttggcgcgaacgtcagagggatcggttccacctttctcggggccgtatgtgaactatgtgcagcgtctcccgctcggaactgttgggctggttggtggattcgtgcattgaaaggcatttttgttgatttttgaagctaacccgtttatttttttgtcgtaatgtgactagatcacgccgtggaatcacccgttgctgattgctgtgaagaagctggctcctgcgttggcggcgggcaattcggtggttgtgaagccgtcggagttggcccctctcaccgtcgtgctgcttgctgagctctgtcacgaagcaggactacctgccggagtgtttaactgcgtccctggactaggaggtgttgctggacaggctcttgcagaacacccatcgattaagaaaattgattttacggggggaacagcgactggaaagcgggttgctgccgctgccgccggcaacctcgcaagtacgacgatggagctcgggggtaaagcaccgatcgtcgtctttgatgatgtggacgtggacgaagtggtcaatggcgcagcgtttgcgtgtttcattgcaagtggccaaacatgcgtgacgggtgcgcgcttgatcgttcatgaaaagatttttgacgagctggtcgataagcttgtggcgaaagtgaagccaatccgcctgggggatccgatgaatgatcgaacacaaatggggactattatttcgaagccacatctcgatcgtattcacgctatggtggagcgtgccaagcaagccggtgcaacgatacgctgtggaggccgccgagccccaggtctcaaggtgtggtcaaccattcatatagacatgattactgatgctaacgccctcaaacgcactacagggatacttctatgagccaacggtggtcacggataccaccccggacatggagattgtccgggaagaagtcttcggccccgttgttaccgcgtattccttcaaggtgcgatatcgtatgcatggcgctgggttgtaaacatattccctaacatcttttggtgtgggtgtgacttcttggctctaggacgaggatgaagctgttcggctagccaatgagtcgccatttggacttggggcagcaatatggacaaccaacatcaagcgtgctcatcgtgttgcgcacaacatggaagctggaattatttggctcaacgaccaccatcgtaacgatccctcgagtccttggggtggtgtgaaggacagcggcatggggtaagttctacctgctactatcatcaagaagcaaaacggtactaatcgatgaaccatcatttaacgttggcttacagaagagagaatggtttggaggcgtatcgctcgtactcccaagtcaaaagtgtgatagccggatatggaagcgaaaagtttgactggtttgtcgatgacacggttcgatacggctgaatcgaagagccaaggtactcaatcttacagtatgaaccagagatgttaaaagaaagccgatcaaaaatgagatttttctcaaggctataagaagataaaagaagactttcaggctatcaaaccgcgttgaggtcgactttagtggttgacggcgttcttacgtggggagctggatgctgctgtcgctgtggtgctagacgaattttcagcagccagtgtggcgttgagtttgtggcggaagacgtccgagtgcaccacggccacgtccttggctgggtcgtcgttgtcctcctcgtcctcgtcttcgggaacgcccctgccttctttggggcgttgcgcattgctctcgcccttgatcgtagatggaggctcgacaccgcagagcttggaaagcgggaggttgttcgagtcgcgctgctgtcgtcgtccttggtactgccttagacgtcgcagcgtgtcactgctgttcggggtcgcagaggcctccgtctcctctaggatcttggccattatgaactgcataatgcgctcttcgatcgcgccaattcggcgcatcatacccgcctcccgtgtagcctaacgtataagcaaaagtggtgagtaagtgagaaggttgacatacaggcgatcgtccttacattgctgtcgaacacgtcttcattgcggtcgttcgggaaaaactccttgtagatatcgtagatgggatctcgaaggcatttcaccctaacacactcacacacacgattcaagttagagagagttcaggggtctgtagatgcagtactgtactatggacccacgcttctgcaaatatatcggcgtctttcacccagcgcttgatatgaactgcgtcggcatcgaggagcctctgaagctcagctttaataagagatagcacacaaacgaacgcctcatctcaatcgcagatcttcgatcggtctcgagcaccacgtaacgtaccggaaggtttttcaccgtcatcagtagcatcgctctcttccgttccgctgagtctggcaatgtcttgcgtaagctgcgcaatgaattcatttagcgcagcgtctggacgtatgtaagaagaaggaatccgtgggctgcttagctattgtgtcccctacacaagcaaaagaagacgaggaacgtacttgctgcagtctgagcttcgatccgagcgaacacgtctgccttggtgcgctcttgctcgttgtacttctggatgaactcgctcagattttttacgttcgtctcctctacgatgcggtctaggacccgtttcttctgctcgaaagacacgatcttttgctccagattctccttcttccacttgcacgatctgacaagcattccacaaccacgttagcctcaaacaataaatgaaaatattattatggtctagttcaaaactgttatatccaacgcacctcgcgtgttgttttcggcgctgggcaatgttgttgtggaacatgctgtatttctgcgcaaagcaaaacgacgcccgagtaagatcatttcgagcccaagaaacccgcccacacatgcaaacgtacatgcgacacgggtgcaggttggtcttgagttccctgcttctccaccttcacgatctcctccacctccagcagcagcctctgccgctccagtcggaacgcctgcttctccgtgtcaaactcctgcttcgtagcagcgatttcgctcttcaactccatcccctgctgcttcagctcagcaatctcagcttgcgccgctctcatgtcctcttcgtcctgctggatctcctttagcatctccttctcggcggccagcgcgtccaggcgcttccgtctggtctcatcgatcgcacgtcgaagcttgtgcagctcaaagttgcgctccgctactgcaacttttagtcgctcctctgtctgcaacatcctgccactagctgctgtagtagccgcagtagtagcagtggacggtcttttggcgctggtctcctgctccttctccacctgcggaatcgtcggcagctgctgcttggcagcctctttgctgctcgacatcgccacggcagtgaagagcctcttggtcttcgtagtatctgcggtccccggtctcttttctccctggttggcggtcttcttccgctctcggagctgcttgtgggcctgcgccagtttggcctccagctcgacgagcttcttcctctccgtctgcgccttgatcaacgtgaggtcgccctcggtccgaatccgatccagctcctcctcatactgcgagtgcagcgggttgatgaggaagtggtgctccacggagctcgccttcttgtccttcatgtttgtggtcgcctttaacggttttattaaagctcgtttccacccaggagtagcgatcactcttcgaaatcgatatctctgtgacttgtgcaggctgcacagtgcagcacaaacaggcgagaagtgcaagtgaaagcgttgctgaattcggcggccctcaagctcgtcgtttctttatcagacattaaactagtgcagcttccaccccacagcggcggggggggaggggggtctttgcgctgaagatctaccgataccccggttactagcaagatcatgcggtccctcgcctctgatcttgtcacatgagctcactttgacaattacatcaaacattactaactacttacatagtagtaatggcttgaagcctatggcgggggggggatccattactaaacttctgcagtttggattctctcgtcatgatggatgaagagttcggccgccttcagtcggctttctgaacagtggaggacgactgcattcgcgaattggctcagtgtcgaccatgtcgtctcccccttcttcatcagcttcttcaccgccaccgccgtcggccgtggtgtcggcgccagtggaagcagttccagcaacagcgacggcggatgacgccgaaagcaccttttgggacatcattgcccagtcgcacccgaacttggagagctacggtgaccaggagctaatgctgagcaacttccagcccacaatcgacaccaactccatactgccagacaatgtaccgtcgtactcttcgttcgcaagcccaagccactacgtcacggtcggcactcgtcaagacgggacgcctttccgtacggatatcaacctgcgtacttagtaattatgtttattgcgacgaactaactagaatactcctgctgcctacagctctttcaaagccgattattcgcgacgacgggcttctgctcgtgggaacggagatcgtcgccgattcatccagtccacatcgcgaaaagaaccgcattttcgtggcaaactttctggccccaagcggtgcaaaccagtcgctatcacacttcgagattgaacaggtacaacaacatcagcgctggtttgtctgaattggtacggtatttcatattctgatactatggacgatgcttgcttccttttcgcaggaggttcgtgacatccattggattgacgtgcaagccgcaattatcgcgatcggaaaggaaatccagctgatccaggtaggtgacacaaccgtgggaaggccctgcagggtgcaaggtaggcatagaagattgtactgcagttcggtagtgctgaaaaaaagggtctaacgatattctttgttatcgtagaccccattaacagtgtacactcagacgcaattcgggagcttgcagtctcgcgcacaacgccatctcatgtggtttctggcggtaagttggaaattcagagtttttgatttcttcgctgctaattaaatgtgtgtgtattgcatctttccaggcttcgacgagactgtggtagtgaccgatcttcgggacagaggagatccaagggctgccgccatcatcgggaagttcgatgcgcacgacgttgtgagtagcgttcggtggtcgtccacggacgcctcacacctgagctggaccacggacgggggcgacttccaagtcgcagactcccgggtaccatcgcctcagctccaagtgcctctgcatgcgtatctggtgcgtgcttctgcttcgaacgcacacaagttgagcttgcaaacattttttcacctcgaacgttatgtagaatgtcgataagctaggcggcttgtttgcgcacgaatacctgagcgacctcactgtcgctctgggattcgagagcggatacgtcgccatgttggacctccgccatcctcgacagtcggcttgcacttcactggtagaatcgaaggtgacggcggtcggtgagatccgacgctcgggcaccaagcttgcgatgtttggtcgcagcgggtacgagctatccttttaacctattttgttggtatgagagagtaatgttttgtcgttgcgttgccaggttttcaactgcaggactgaacgacggcagtatgagccacctcacgctgtgcgtagtggccatcttctgatattctggtacttgaagtattgtacagtatcaatactgacgcggtcatggtgactaatgatgtgtaggcggcagcaaccgacccagattgctgcgacttcctacaaaaccagcggtgacttctctttcgaaagtggcgcccacctagcagtctctgacaagtacgtaccctgtcattctgagtttaagatctaggactccagtactgacatgggtttgttgcagtatgggtatcgtgtcggtgtacacggacaacaacatctttggaagcggaagtggcggctggtgaaagagctgaatcgagtaaagaaggaaaacgtataaaaaggaaaatagtagtcaatttcccactttttggtaagcacatacacgttcttaaacgtgcttggacgaccgcaagccctcaagatacgtgcaaaagatgccgaaaagttccgtcatgttgtttttctggggttcacttcccaggaagttcctactcagtacttttaagtacttcactaatggctttgtgattgtgctaagtacgatgacggtgtgggcggtactgtgtaccgtttgagcttttcgattgttgccaagtcgcattttcgatacgcttgcaagcaatggtggcgacgactccgcagcgccaggacggccgcgccggcaacgagctgcggccctttgcgtccgagcagggcgcgctcttccgagccgacgggtctgcgcgtatgtcgcacggcagcagcacggtgctggcgtccgtgtacggccccggccaggcgcgcaactggcgcgccgagaagacggacaaggccacgctggacgtgtgcttcaagctggagaagggtatcacgagtacgccgcaatgattaagctggttgtgctgcagtatttatttaatgctgttgatgctaattgagctctggggcctactgttgcgcgttacagcgtccaaggagagggagtacgagcagatcatccgcgagaccttcacgcccgtggtgctcacggacagtttcccgcgcgccgtcatcagcatcgtcgtgcaagtcatcgaggacaatggctctatatcctttccactgttttcttactatgcatgtgtaccaattagggtgtggagttgattttttttccaaagcggtgccaacgtgccggttggttgtccttaaccttgattcgactcctttttatgaaatcggcacctccttgcagttgcgattaacgccgtgagcttggcgctgatggatgccggagtcccaatgctctcggtcgtcaccgccacttcgtgtggaattttcgaggatggcaacctgtacctggacccgtcgtcggcagaagaggaggtgcggcacgtcgagctatgatacagagtcccaataggattaacgagatatgtttcccctcttccacaggaagcggtttcttgggtcaccactgcgcgttccagtacaagcgagggggtcctgacgtgcattacgaacggttcgtttgacgtctcgcgcaagtgttaaagcagtccagaggctaacttgctgaattgtgctgttttgtatccaggtctgctgtcagaagagcagtacttcgcatgctcggaggcgtgccaaaggttcgaagcgtgcttgataatgattgtgggtgacgtcacgactaaccaccatgcatgttcagggcatcggaaagtgtgacagccttcttccgcattgttcagcaaaagaagcacccacttgagccagctactcagtaatttaatactggaatagacaaccttgtcttgcttgacaagtgcggacaggtggcagcagctccaagtgaacgcattggtttgcctgagttgtttcggcatttgtaaagatgccaagttccgttttgtctgctcttatcacgtggtgaactcaacattaggactcataccagggatgataaactttcttttattcatttttcttgtatgttcttttagtgaaaaagaagattggtgccaggcaactgcagcagctcaagggggtggggccggccttggccaaacggatcgtcgaggcgaggccgttccaccggaaggaagacctgctggccgtgaaaggcatcggggcaaaatcttacgcgaaaattcaagcgggggctcaagtgaaagtgaattcctacgaggaacacagtgggggagaagaggttgaagacggtgtcgagtgtggccaagagggggtaaaacgagacgcaaactttcacatttgtcgggagattgagagcgacgtgcgtggaaatgtgtttcaatgtggaattgtaacgggtgtgacaaccgatcgctcatcgtggcgagctggaacatccgcaacatttcaagacgcaaggagacggttctactggagcgaattgcggacgtgctggacgagttcgatctcgtggcgctgcaggaagtgagggacttgattgtgttgaagagactcaaaacgatgctgcctgggtgggactacgtggtgtcggagccggtggggcgcaagaccccgggaatgaagaagcgtgttgagcgctatgctttcttttacaggcggagtgctgtgcatcttgttgagaagtgctggctattggaacgtgacaagaatatgttcaaccgactaccgtgcgtcgccacctttcgagcgacggaagcgtcgggattaccgcagctggagctcgcgttgatgaacgttcacgtctcctttggtgagaaggaggaccgccacgccgaaatcgtcgagatcaaccgactggcagcggagctgagcgagaactttggcaaagagaggaaagtggtggtgctgggcgacttcaacttgtcgccgcaggacgtgctgggtagtctggggtcgcacaagatggccctgatccgctcgccgttgtcaaccatggtcttcggaaaactttacgacaacatttggctcgatcgtgcagacttcaccagtagcagcaataacccggacgaaaaagaagagcgcgactacctcgtagacagcggcgtcctccgcgtggattggcgatactaccctccttcaaagagcagtcgtctttccgtgcagaacccgatggacgcgatgcttccgcgactgcaaacgtatatgtctcgcgttcagtgcgggtacgagctgtcggatcattgtcccgtgtgggttgcgttcgcatcaacaaggcgcagcaaacagggacaatgtctagaagccactcagtgaaacagcttcctacgtttatactggctgagattcataagcaccatctaccacctagctaccaactaccgctaccttcatccaacaactacaagaccttgttatctctgtccgggtactcgcctgccgcgatctcggagcgcatcgtgacggtcgtgtcggacttgatgacttgcgtcatgcagaatggacacacgcgcaccttggtccagtagagcttgttgtccgggccaatgtctgcgattttgtgcaatacgcgacagaacttgcacacgcagctcccgcacagcatgcagttgtatcccttgcggaccgtcggcgtcttctgacagaccttgcactcgttagagttgaaacttgagatcgagtcgaagccgttttcccttcgctcccgaatcgcccaacgcagctttttcatgtgcgcggcgaagaaaatgttgatgcacgacttggacatggagaccagcaccatgtgcgtgaagagagctctcgctcgctcgaaggggatggcgaacaccgcgcgaccgtggatctgcacagtatccttgtcaatctgacggaagaagaggatgccagcgacttggcccctcgagtgcgtcgacaggggaggggtcaggtgcgggaagtcgatggagtgcagcagctggtagctcacgcggtctccgttgctcagcgtggtgaagcctgtggcctcgaggtagatgtggtcgtagctcttgaggaaggtccgcatcaccggcgggttctcggtcactcgccagcggatagtgagcgacgtgaacgggtccgcgtccgtcacgttatcgatcagcgccagcacgttgcactcctcgatcttgtcgtcgacgtacgccgacttggtgcggaagacttcggtcgtggggctcatagcgccgtagacgccgtcctcgatcgtgccgtccttgaagccgacggagcggatatctgccacgtccagcgacgtcagctcgtcgctcttggtgctgctcatactcgcgctcgtgtcggacgtggctcgacggaatcgcttcgtagcgccgaagccacgcaatccgtacttctcccgacgacgcaggaacgtctcgacctgctcgtcacgacgtacaaactcccactggtgctcggggagcaatccgttgttctcgaagaggaactcctcgaactcctccacgttgatggccaccaagtccttggccaactgccgcaagaggtccttctccttgggggtcaagtccatcggcgggtacggactcgtgttgggctcgcgcgccgagcggttgcggaactccctgaactccattgccagcgacgatcaaccgagtaacttcggggaggggagagaccaatctgtcacttgctctcggtgaatgtcggaatgaacctttgcggctcaactgagcccgtcggggtctggactggagaggtgaggagaagtcgcaattgaagggatttgcataacgccggccggtgccttgatatgtagcgttgcaaatgtggcaccgagcagcagcgtcagcagccggtcacgaaagcagggatggggtggcagacgtttcggcaatcgtacgttggtgtgcacgggctttcagatttgcaggtcgacccagcatcttcgggcttcaagacctggctgcgagtcgcagcatgcgacttgtgccagagcaggactcgagtgtcgtgacaagtcagagaagcggcggagcggcaaacgcgttcctgccgaggagcgtcgtgatcaacgcctgcaaagctggctacagtacacccgtccttccacgcggactcatccacacttccccgctaggagaccttggagtgagctctacaaaacgtgaatcgcgcacaataagtggtctcttcgattggcttcgtccttccaggagcggtgcccgctcccatcggcaatgccgcccgctgcgtggcactgctgcctcacccgccaaaatcttgagtttctcgacgagtggtcaatggccgctgttacaagcagtgccagcagtctgggatagttcgtcgcgacaagaaaccacgtacaccaattccaacacgccgcgcaagttatcgagtgccaaattactgtgtcggttgtcgtttcgtccaataactcgagtgaagttacgacttatgactcagacaaaaggtttccagtatacgggcccagcatacagcttattggttcataatatacgcgcacagaaaatactctctccacatgttccgtgtgtaacaatgcacaaacgaggatgaagcacagcaaccagcgcaattctgccggtctgccgaccgttgtgtgctgatctaggcgctagtacctggtcaacttacagaagacgaaagatggaagctgacctaccgagggtctctcggagtattctttctcgatgtcaacatacatcaaaacgacaccctacagcttcagtatccacggcacaattgcacacacgccaagacacagacgccaggatatgcataggcgtggtcatgctcgtctacagaggcaacttgccgcatcctagtggttttcggcactgtcgtctgggactcccgagcttggcttctgcgagtcgcagggcaacaagtggatgtcctcgggcgcagtgtcggaagccaaaaaaggtgtacaggtctggcgagcgcttttgtggtcctgctgcggacaagttgttgaactctcgtgccagcaaaaaagaccgaccgatgaatttcaccgagaatgtagtattgagactacagagcgcggatggtcaaacaagcaaggaggttaactcgcatgatggatacgctgaatctgctactgtatcggtctctgtcgtcgccggtaaaggtcgaaatgacgactcaagttgtacgcaagtcgagaaccgtgatgatactgctgacgagggattagtgtacgcaattgtggatcgcatgccggtagggcttgcgtattggtacagcgtccagtggcgagatgagcctgatggataccggtgggccgactcatggctgcccaggaagcgtttgctggaggacggctttgagaaagcatgtgcggtcgtggacatgtggaaagcgtctaagtacgcgtcgttttacgagttttgccgaaggaatggacacgtgcacaatatcggtgcctcgccgtcagcgaatggaaaatgtgcagttgttgctgtggagactgcagttacgcttctcggtaactctggttgggcaccccccgggtgctttggtgcatttgtggagtactgcgaccagcggggtcgacccttgtcgcctgacggtctgaccactcgagagcttcgtttctacatcaaatacctgaatgatcggtgtggtagttcgaagacaagtcagatcagcatccgcgtattcgatgacaatttgataggaggtgtcaacagcaaggacgcgtcggaagtattggtgtgatgcgctctagaggatggagtttacgtgtgcgctgcctacagctcactacgagtgacgcactgctttgcgatcaaagttttgagtggtgataagctcatttacgatgacaacaatgttgcggtggaaattcaagcctatgacgcagagtggatcattgggattatctttttgcgccgaatcgcgctatacctccctcagtatttttggctgacagcgtcttcgtcttaggtattacctcgattggcttagccacaatatacatttcggtaagactgagagttttttaatgaagccttgggtttgttacttactcgtgtcttattaccacgctgttagtcaggtcagactgcaacacgcgttcattctacaaaatccttgaaccaacccagaagatcgtagcacaccactcagtatgagggcacacaacgcagtatggatcttcgcggcagcggtggggaattgatacgcgcgttggtatgcaagctttcgtcaaactctacctgaattggagcggcgtacgcgtgacacaaccttcttgtggggccgtggctgtgataaaattcgggacgcttggcgtgacattgggccggaggaacgcgcacgtctaatccaagcaacaccggattccagtttccccaatgatacgtacggcatcatagacgaacgtaaggcttacccaggacaacgaaagaagacgtctggcacaacatcgcccaagactactacggccaagaagactacggccaagatggccaccgccaaaacgactacggccaagacgactacggccaagaagactgtggtcacaacgtctactgccacaacgactacgggcaagacgactacggccaagacgaagcggcaacactttcaaccgacttccacgaacaatccaaaacgtgttcgatacagcagtcgagtgactgatgagccgatgccaacctagcctgtacagcatgatactcagctgcaaacacgattcgcagagatggagcgcgcacgtaacaactactacacagtgctaagcaaagagcaggatctccgaatccacgcagcttacaatggcgggagtatggtcggtattatcgaagctgctgtggccggtgcgcagaacgcggtcgtcttgaccagaatcaaggacaaacctaatacagtggaggacgcgttttccgccgtcgcacttcgcctggacgatgtactggcggttctaatgggaaccgctcagttcgaaccggaccctgagtacgatcaacccgatccaaggtttgctgcggcgcggattagacgcgcaaaacgacgatatgatgataccaaaagcgccctgtacaagctttgtgttgagcttggagcggatgaacctggtgagatcgtcatcgggaatcgtacgagccgattctttgggagagtttaagtgcttcgaaactttttgtgaggaagcgatttaggctgtgggtatcgtcgatttccacagcgataaagcaaataatacatgtattcaatcacctagagggtttgacctagtcagtgttctctattctaatagaatgtcttgaactgtcagcgttggtgctgcatgagcagaccttccaacgggccctgggagaccttcagagctgggagctgaggatgtactgttcgtctgcttcgtttttcggctagacgcttttcccttcgacttttttggtttggattgcttacgcttaaatcctgaacgttttgccttgccctttgctacgattctgtttttcaacttcgccagtgggtcgcgtacactactggtgatgttaaatttccggacaaccgctacaacatgccagcacatcagcattttcgaaaagtagggacaggtgcatcgcttgcgtgtgatgtcaactagccacccatcggaaggcattcctatgcgatgcgaacgccgtagagaccatgatgtggcttgctcgaaaagccttttccaattcgtgaccgtgtcgtcgtcctcctgtccatctgaatccagtctagatcgtagtatggctgggatatcgctcgccgacgagctaccggacgaatctgatgttgggttgtcttgcgtggatgtcaatgatagaaacaaagccaattggctgctcggtcctgttgccgtatcggtacgcgtggagggagccgcattgactgtctccagaagaaatccgttttcttcttcagcttgttcgtctgtgtcggcgcgtagaatctcgaggactcgtacttggttcgcatcgcttgtcctggtgataacaactcgagaagcttcaagcatagctgccgctgccttcactaactcggatgttggtgtggatgtatattctgctggcgcgggcttgacgggactcgtcgtttcgatgaaggtcccgattttttcgagtaatcgacacatatgatgcttatggcgctgcagaaaatgctttagtcctccatttaggttctcgcagggattgttggttaatgcgtagccctcaggattgtggtacagttgccatcgccaatagcggcctgttagccactgctgctcgaagtagtccgcgaattcaacgagatgtgtctgcttgcgccaattagctatttctcgatctggtgtacgctcgaactccaacaagctttgcgtaaaatgcatgtcgacaatcgagttcatcacatttctccttttatcaaagggcaggtgctgtgtgcgtttacgtacattgtccataacgtgaaaataacacatcagcttcgtagcattcgcaaaacaaggcacgttctcgagagccaagaattgagcatcctcagcatcgctcatggttgcatcgatacgaagtgttgctcctcgaacatgccggacgacgtcagcaaaactgcgcaagcactcggtgtattcatgttccgtgcgccgactcaccacgaaaaaagcaccaacttggtatgaacgccctcggtccgtgaagccgcaagttatcactggatagcccaagtcgctaaccttaaacgtggcatccgcatggaacagcacaaaagcacccgagtggcagaaccgtaggcagctatcgataagtgtgagagacgtcaccccaataatgaaaggatcgtcgtcctcgccggaccccacataaacaaagccatccgtgtccaacttaggtccaaacagaaaagcagaatctggctgaagttctggtttgtagcggcgagcgcgagccatttcatgcacggccttgattgaatttttggtgcccttcgaacgccggtgaactgtcagcgcattttgaatctgggagagctctggccatccgcctttagatggcttgatatttgcttgcttcttgagatgtgccagaataatacgtggggcgttcccaatctcatcttgtgccgcgataaatgctttcatcggctgagtcacgactggccgatgctccgcagtacagggaagaacaccacgggcatgtgcctgctcgcttacagttatctgccacttgtcctgagctgtgcagtagaacaccttccagaccacgccacatttgtcaaactcgcgacaagtgctgctcaagctccgaagacgtctttctgtcatcgtatgttcatcagcacaaacacggcagttgtcaaagtcgaccttgtgaaatatcgccgagcagcacatcgattcgtcacggtagtcatcgaattcccccgtggaattgtgcacggctagctgatgccagccagccatggccgctcctgaacgaaaacctttgtctgcagccgcccgtgtggtaacttggccagcacaattaagccgatatttatatgcctcacagtggttagcggttatattggtgccccacaaatataccgcaaaagcctgatagatttagcacactgaaagatttggcagggatgacctcgcctgtataaagagctgaccaatcagtgcacacctaatgtattaacccaccttgttttgaaacgatgtggttcacatacattatgtacctacacaactacttccgtagcagagaccaccacaaccggcgaagagcttggcggcggcccgaatggaaagaacggaccggcctctacgaacgaggcccggatggttgctgccgtgatagttccaagcgcgtgaatggagcgctggaacatgtcgtagcggcgttcccagttcttgcgtggcggtgggcggtgcgtgtacagcgcggtgtaacgggctgttagactgcttttgataggagacatgactcccacatctagcggctgagccacagaggtacaaccggcagggacgtacacagtgtaggtgcccatttctgcaagccgttgccgcacggcagcacatttgtgcactttacggcagtccagaatgaggacggtcggtccgctcacctcaaactgccacaccttttcgatccactcaagcatgacacgctcgtcaaaccacgccttcgtttgacacgaaaacgtagcgacgcccggctcacagtaggtcgacacttcggcgtacacgtcattgtcgggctcgcccgcaaacacgaagcgcggtggcagcatgcggccatccgcgcatgcgagcagcgcgacggtgcaacggtagctgccctggccacctccaacagcagggacgcgagtaaccccgacgaagtccaccgttgtcttcgatcccgcgtcgcagtagaccgcagtctggtccatattgtagagctaatagggcggcggcgtcgccgtgacagcatccacaaagtggtcaatcagcaccttggtcacctcgcacgcgaacgcatcgcgcagcgctatcagctcccgcagcttcttgcggccagagtacgagatgcgcctaatagtgagtccatttcgccgcatgaactggctgcaccacgatttacgtgcggtggctgttttgctgtcgaggaagcccggcaaaatcaccatgcagtgcgcaatgatgcaatccatcgacacggcccgctcttcacgcctctcgtccttgatccagccccgtagttcttcctcgacacatgcagatggcgagacgcgcccgctaccacctacagtcagcttcttagctcgcttcttgtcttcaacagccgccttcatggagtcataatggtgctcccagtactgtagcgtaggacgcgaaaagtctcggccagtgcaaaaggccactcgggtttcacccgatgcagcgaagtcctcgacggtcttgatcttgaattcgatggtatgggcgagcttaatgcgatgcggaggcattttgccaatggctttccccagatttatctaccttcttttgaaatgcgctcacatccaaccacctctattcgcaattttgattggccaatgagcgacaaccttgactttctgaaagacttggcacccggcaaaactgctttagtgaagggtgccaaatctatcaggcttttgcggtagtctctccctgttgtcactccaactgtatggtgcaaacccatatttatattcactccccatgtacgtatatttgtgcctacaaatctgtatattttgacaccatcgtctatgactctggaaatgcgcaattcagatgttacaacggaggttgagagcaatctcagagctcctgctcattcgcgccgtcaacggtactgctcggctccacggatgctgcctctgcctcttcgtctagctttcgtttaccatggcgcttccgaaaccggtacgcccagcccttggagaagccaggacgcttctccgccggcaggtcggaaaatcgcgcctcccagaggagcttgccgcgggccatcagcgacttctccgtcatgggctcgcacagacggtcgaactcggccagaagcgcccggtcgaactcctccaacaccgggtccgcgaccctcttgttgcggtagttggtctcggacacctggagtagcgtggcctcagacttgaggatagtgtccagcgttcgctccgacatgggctgcggcaggtcgaactctttagtggcccactcacgcagagcttgtcgtttcagacatttcagggtgccaggcagctcgtgcgccctttgacagagcataaccttctgcccgagcgtgaggcggatatacgtcttcttggctgtccgcggcatggggggcttgcggagaacgtggcgcgcttccagcagtggagcacccaagccctggtcggatttcccgcctaaacggaacgagtttgattggctgtttcaaacaggtacagtgtaccctaattctgattccgtgttttataataggtcaagttatcattagagttacccaaaattgtggtattaatactgtacgtgtcaattgggctcatttaaccgctcgacgagcgcaatggagacttgggacgtctcgtgtattccgccgctggctggcaaggtggcgtgcgtcacgggcgccaactcgggcatcggcttcgtcaccgcgctggagttggcgcgcaaaaaggcgcacgtggtgctcgcctgtcgcaatgccgagcgagcgcagaaggccgtggacgccatcaaagccgagctggaaccggaaaaggcgagcgtggagttcttgctgctggatctgagcgacctcagcagcgttcgagactttgcagagaagttccaggccaagttcgaccgtctggatattctggtgaacaacgggggcgtcctgatgccctccccgacgcacacgcccgacggactggagatgcatttcgccgtgaaccacctcggtcacttctatctgaccaagttgctcttcgacctcctcaaacgcggggacgagccttcgcgtgttgtgagtgtgagcagtgtatcgcacaagtggtcgacgatcgacctgaatacgttcgccaggtccacgcccaagcgggcctaccaggatgaatacggcatgaccaagctggccaatctgctgtttacctacgagttgcatcgacgcgttgttgccgcagacttgaccgacaaacttatcgtggtggctgcgcatccaggcatcaccacgtcagatatcgtgcccaaggcgttcgatacctacctgccctcgtggttggcgggattcatgaagaaattgctcgacatgctgcacattatgcaacccactgggcgcggagccatcccgtctctcttcgctgcaacggacgcctcagtggaaagtggagactactttggccccgacggatttcttgaaatctggggcaaacacccggccaaaaccgagtccagcgctggaagtcactcgatagaagacgccgccgggctctggacgctgagtgaagacctcacacgatgcaaattcgaggtgagtaagtgaggtagcagctgagacttggcttcatgaaacagaataagtagaagaggagaagggtatcatttcaacaaagtgcaacttcaactttggtgttagtgaaaccaagtcaattcttttgataaggatactaagacggagcgacctatgaattccagaccgcagagctcaatacttcttcttggcgatggccgcgtagaacagcttggcgtccgccacctcttgctccaggtcctcctcccagatccagcgcatgcgcttctgcaagttgtcggcgatcttgtccacgtcgtcctcgtagccgggcagctcgaagtcgtagagctggccggcctcgtggcttgtggccaccaccttctgcgtgcggtacagccgcaccttctcgaaggcctggaaggccgccctcagctccgacgcgtgctgcacgtcggccagcagacacgacagcacgtacgcgtcctcgatggccatggccgcgcccgacccgtggttgggcgtcgtggcgtgggctgcgtcgccgatcacgagcatgttgccgcgcgtgtaggtgcgcgccggcaggtggtggaacagcgcccagatgtccgtgttctccatcatggagatgatgtcgcgcacgtgcgtggagaagccggcgaagtccttggccaggtcctccttggtggtgcccacgacccagttggggtccttccactcgtccttgctggcgaacgccaccacgttcatgacgtcgccatgctggatggggaacgtgagcacgtggccgtggtatccgaagtacatttggctgttgcgcgccatctcgtcgcccagcagcgcggcggccttgtccatcgggatgaggccgcggtagacgtacttgcccgagaagacggcgttggcggccgggtcgttctcgcccaggaccaccttgcgcgtgcgcgacttgacgccgtcgcagcccaccacggcgctgtgcacggcctccgagccgtccacgaacttgagcttgacgttgccgtcggcgagcgtctcgatgtcttgcaggcgcttgccgaacttggcgacgccctcggggatgagcttgaccatctcgtcgaggaagtgggcacggtgcacgtaggccgagcctgcgggcgtctcgacgctggtgatgagcctagtgtcagcagacagtctcgcgatgagaccaggctgctttcgagcggagggagcttccctccgtcagtccggcgcgctggctgcatgggacagacactaaagtctgcaacatgtaccgagggcaccgggaatgttcattccgcatcatggcccgcaaactgagacgagcaatctctcggtgcaaggtgtgcatgaacttcatgccatgaaggcaagcaagtacatgtataacgtactgtagtcgcaccgaactacggtatccattacccagcgccggtctcgctggctgtgtgagttcccaagcaatcctggctcgcaacgaagcgggcaatcgtggccttagtcagctggccagcacgtgcagcacgacacaattcggtgggacggacctgtctccgtgacgaacaacgcgcgccggctggatcaccggtctgagcccagccagccagcatcgacgttggatcggcggcagctcattctcccatttgcgtggtctcaagcaacacccgaatatcacacgaccaccaccaccgccaccaacacctcgctctccacagccatggtccagaactcgtcccgcgacttcgacatcgccatcgtcggcggcggcatcgctggagccaccctcgccgtcggcctcgtgtgtgccaacatccccgtcacgctctacgagtcggccaaggcattcggcgaaatcggcgccggcgtcgcactcgccgccaacgcagctcgggccatggagctgctggcgcccgacgtcaagcgcggcttcgaccgcgtcggcaccttcaacctctcgacggccaagaagaacgtctggttcgacttccgcaagggcgtcggcacccagggcagcggcgtggacgaaggcgccggggagctcatcaccagcgtcgagacgcccgcaggctcggcctacgtgcaccgtgcccacttcctcgacgagatggtcaagctcatccccgagggcgtcgccaagttcggcaagcgcctgcaagacatcgagacgctcgccgacggcaacgtcaagctcaagttcgtggacggctcggaggccgtgcacagcgccgtggtgggctgcgacggcgtcaagtcgcgcacgcgcaaggtggtcctgggcgagaacgacccggccgccaacgccgtcttctcgggcaagtacgtctaccgcggcctcatcccgatggacaaggccgccgcgctgctgggcgacgagatggcgcgcaacagccaaatgtacttcggataccacggccacgtgctcacgttccccatccagcatggcgacgtcatgaacgtggtggcgttcgccagcaaggacgagtggaaggaccccaactgggtcgtgggcaccaccaaggaggacctggccaaggacttcgccggcttctccacgcacgtgcgcgacatcatctccatgatggagaacacggacatctgggcgctgttccaccacctgccggcgcgcacctacacgcgcggcaacatgctcgtgatcggcgacgcagcccacgccacgacgcccaaccacgggtcgggcgcggccatggccatcgaggacgcgtacgtgctgtcgtgtctgctggccgacgtgcagcacgcgtcggagctgagggcggccttccaggccttcgagaaggtgcggctgtaccgcacgcagaaggtggtggccacaagccacgaggccggccagctctacgacttcgagctgcccggctacgaggacgacgtggacaagatcgccgacaacttgcagaagcgcatgcgctggatctgggaggaggacctggagcaagaggtggcggacgccaagctgttctacgcggccatcgccaagtagaagtattagataacaagcagtactggtagctgccgtctacgtctagttagacatccaatgggaagggcacgttgaagttggaatgtcgcacgaatgttgctttagcattacgcctccagtcacatgtgttcccaatgccgcaccaacaatgcttaccttcctgcaacatcctacacagcgtagccttgggccagccacatacaagatcgtcgccggcccgtaacttagaagagctcctcgacaccctccgccaccatgatgcaagctccggtgatggttctcagtacgtgtgtttcctcccctctccgcgtacccccttcctccctctaacctccaacctccctcctcctcgcagacaccaacacgaagcgcgagacgggccgcaccgcgcagctgggcaacatcgaggccgccaaggccgtgtccgacatcgtgcgcacgacgctgggcccgcgctcgatgctcaagatgctgctggacccgatgggcggcatcgtcatgaccaacgacggcaacgccatcctgcgcgaggtggacgtggcccacccggcggccaagagcatgatcgagctgagccgcgcgcaggacgaggaggtgggcgacggcaccacgtccgtcatcatcctggccggcgagctgctggtcgtggccgagcccttcctgtcgcaccaggtgcacccgacggtgatcatccgcggcttcaaccgcgcgctcaacgcgtccatcgagatcgccaagacgctggcgcgcaccatcgacatcgataacaaggaggacatgcgcaacctcgtgcagtcgtccatcggcaccaagttctccccgcgcgtgggcaacctcgtgagcgacctggcgctggacgccgtgctcacggtcgtgcgcaccacggcctcgggccgcaaggaggtggacgtcaagcgctacgccaaggtggagaagatccccggcggcgagctcgaggacagccgcgtgctcaagggcgtcatgttcaacaaggacgtgacccactccaagatgcgccgccgcatcgagaacccgcgcgtgctgctgctggactgcccgctcgagtacaagaagggcgagagccagacgaacgtcgagctcaccaacgaccaggactggaacacgctgctgcgcctcgaggaggagtacatcgagaacctgtgcgcgcagatcgtggccatgaagcccgacgtcgtcatcacggagaagggcgtgtccgacctggcccagcactacttcgtcaaggccggcatcacggccttccgccgcctgcgcaagacggacaacaaccgcgtggcgcgcgccacaggcgccaccatcgtgagccgcgcggacgagatccaggaggccgacatcggcaccaagtgcggcctcttcgaggtgcgcaagctgggcgacgagtactttgcgttcttcgaggagtgcaaggacccgggcgcctgcagcatcctgctgcgcggtggcagcaaggacgtgctgaacgagatcgagcgcaacctccaggacgccatgcaggtggcgcgcaacgttgtgttcgagccgctgctgctgcccggtggcggcgccacggagatgcgtctggcgcacgagctcaagaagcgcgcggacgagatcgagggcgtggagcagttcccgttccgggcagtgggcgaggcgctcgaggtcatcccgcgcacgctgctgcagaactgcggcgccgacgtggtgcgcgtcatgacgtcgctgcgcgccaagcaggccgagacggaggagtcgtacggcgtggacggcgtgaccggcaaggtgacaccgtcggaggagctgggcgtgtgggagcccttccaggtcaagacgcagtccatcaagacagccgtggaggctgcgtgcatgctgctgcgcatcgacgacattgtgtctggcctggccaagaagaagaactaggtgtcaggtgatctcatatcgcaacgagcgtgaaccgcatggatattaatatatgctttgaggggctgaggggctggagatcgatcatttcaggttatgtaaaaggtcgctcgctggatcggcagtttgtattctggatcgcgttgcaagtcatggcgctggatcgcgagctgcggcggttgctggagtacgcgaggctgccggagactgacaatgcctcgtcgaaagatgggaatccgccgagaccgactgcgcgtggtattctggaccgtatcatcggcatccaccggcagacctgcgtgccgtccatgggtgtgagtgctgacatgaatctgccagagctgttggtcttgactgcagaggctgcgatcttccagggagatttcgacaccgcgtctgaaagtgtcgagtggtttttcagcgagtgtcagctaaagaaccaggtgcgtacaagtatcactgaaagctgcagggctcttgaaagcatactaacgactcgatggttgcttgttgtgtgtagttttactgccgagcgcaattcgttcgcgcgcagtgcgggtctcacgacgctcagtcggatacgggagtgatgaagctgaagaaggtgctcaacgccatccacttcattctggctgtgatcccgatcgctaccgacagccgcaagcgcccgatgtacgacttcctcgtctacaatgcgtccgtgacgtactggcagatcgcccgccagctcatgaagcagtctacgttccagttcctcgtgccgtcgctgacgaaggtcatcgacgcactcaagttgactgcagaagcggatgtggcgtggatgcttcaactccaactcgctctcgtttacgctcaagtggacgccaatcaaccggcaaatgctgccaagactatcaacgacgtagtcgacgtacagatcgcccctcgccttgctgacccctcgaaggctgcggacgagtcgttcaaagccttgtacgaagaagcgttgcggatccaagtccacgtcggatccttcaaggacccagagtgtcagaagatcgtgccgaatgtcaagcgactgcttcctccaaccaacaagcgctcgtctctgcttgtgaagctgcagtgtgtcaagtccgggaacctctcggggacgttagaggcggcgtacgttgaaatcttccaggaagcgactgggtttctcgctttcgcccctgaaacgcagttagacgaagtcaaaacgttcgtggcgtcgctggaaccgcgcgcgatggatgacatcgacgctgaagtgatcgtggagaccgctatccatgctgccttcaacaacacgttggcaatagcggtagcgtgtgatgtcattctgcaacgcaaaggcaagaacatgccgccaaagattcgagtcttgtaccaagtgttgggcgcgatattgctgatcgtactgccctctcagcatactggtagcaagatgagtttgcgacaacgtcaagcgacgcagctcgctcggcgcgtggaggggatgaaggcctttgagcgcactcttctagccagcaagcgccagcaggacccgcagttggttgagagggtgtgcatctacgcctggaacttgtcgctgccattgctacagcctcacttgcgcagcaacttagcgcgagtgttgggtctttcgtcttcgattttggaagaactggactcgctgctgcttggattgcgcgctcgactctacctggaggttgcgaagcttgaagtggcgtccgatttcctggccaaagcgaactcgaatgtcagcaaggcgcttactctcgactatgggacgatcgcccgccccaacgatgcgactgcgatgactgtcgagcttctcagtacacacaaggactggatcgctcgaccagttgacacgcatttgttccccatcaagcagaagctggaattaaagttggggtccgagagctcaccttcaaagtcaagcgaagtgttggcgatgttggagcaggtcaaagtcgctaaagaccctcatcagcagcgacccactgttgaacgagccattgacgtgatgacggagatcagtagctcaacagaggagtctactgatgttgcagatcacgtcagactctggtgtgagatttcatctcttgcgtggaacggcttgcacgatggtgagctcgcccagagagcggttgaaagtgctctatcgacatacttcgccacaactgaagcgggggaggttgtggccccgaagatcatttctggcgagaagagcttgatgatcctcgaggttgatatgcgtctgctgttagtcgagattctcgcgacgaggcttaaagaccaggcgaccaaagttgacaatgtacgtcgtcaagcagaatctgccggaaattggttggagtcgcagggtgttgaacggaaagccggtgggagaagaaggtcgagcattgatctctcagctttggtactactgggaaaggaggcgtacgtgcttggaatccagcggccgcggccacatgcagaagcatcgccgacgtcaccgatggatccgccgggcgagagtgtagagctggatgaagacgcaatactacaagtgcggcaaagcaagctggagagtgaagtacacgctgtcaagagtgagatactgaagcatctggccagggccttgaaggcagcgacgaagatcgggtggacttttgtgttggagaacacgtgcatctacctgtggaactatcacttccacgtcttccgcctggtgctagagtcctctcggccagagttctttgaaccgcagtggattctgccggagtgtgtcagtgcatttgaagccgtttacgcagctctagaagctgcagcaaatgcagttgataacgacctcctcgcctgtgttggacttggtctatcaagtatttacgagaagactgctcgactggataaggccctcgcaattgctgataccttcttgaagcggaaaccactagcagctcctgcagggttcagccttcagagcagtgtgggggtgctgcacctgaaaaggtttgcagagatgaagtcaagaatccagattgctcagaatacaaaagagattgcgcctacggactccagcacagcccaactcaaggtagtcgcgtacctggaagcgatggaggctgtattccgacaaatgttgctccctgcagcgcaacaacctcaattgatggagaaagcccaaggattataccaaaaagccgtcgggatatggcaatcgagcgctcctgagatcttcaatgcctttatgagcgatgacctagagcgagtgctggaagaagagcagcaactgctggagctttacgtggaggtttgggtccgtgtcggctgcggcgcgttccgtctccacagtacgaagtacgccatcgagtgcgctgaccaggcgttgctgccgcttaagtccggggaaggcaagaaggccaggcagatgacgcagcttcttgtcgtagggagcacctggaaatggtttgcactggctgaactgctctacggacgtgcgatactggcgctaacacaaggggattctccggcgcaaaagctgctacttgcctcgctgtctcacctcgtgcgtgcgatcgagtacggccttcgtgggagcatctccacgcttgtcactcaggcgtgtgaagtgatctggaacgcgacgatatcggctattaaccgaggcaacaccgtagataacgacgaagcggaagatgacttcctcgaccgcgtcgtgcagcacttgaggaagacgttgcgctatctggaccaggttatcgcctcccccgaagctgatttgtccttttacggtgaaatggtcttgctaacgctcgcagtgtgcgaaaaggccaacaaatggaccgatcagttcgcgatctgtgacgcggtgctgaaagccttcggaccaacctcccaccgagctccccttcccagtgagatcatgaaggagatccaaactgcgtctgcgatatccggagcgcacctggggaggccgagcgcgatgcctaaaaccggaggcagctccaagacgccagagcaactcaaggaatctcttgttcaagctcaaatcttacggaaagtggcgtttacgtcttggaaagacccgcctgcgcaacttaaggcgctatccaacgcgtacgtggagctcgacggccagctagaagagcaggcgctggtgctcgtcgatgtcgcggagtggttgttcaccaaccgctttccgtctcaaaatgccgaggcgtatctcgaatgcgcgaccgcgacgctgatgaattgtcagagacagaaacttatcgcctcgcagatggctgcgtcccgaaaggcgtcgatgtccgtgggttcacgacctaaatcaactgtggtgtactcgccgttgtggtttgccgagaagcagcttcgcgtcttcgtgatgcaaggaaaactggccaagacgttcaccgagcgctcaaagtatttacgtttggctctgattgaagtggagaaagcgtgggaacacatcttcttagtggcaaatgaggtggaatcccaagctgcgtttgatgcggacccatccaacaaggcgaacaatgtggagtatgacgagtggaagaaggataaagcgccgaaatactcgaagccgacgtccgagcgtggttgggtccacttcttcctagaccacgatgagaatgctgctcatcgcttccacacgccatggactaaagcgcttcagtcggtgcagtcgccgactttcgtccacattactcagccggttctaacgctggcttacctcgaagaactggtgacgatgctgcgtgacgtggggcttcaattcggcgctatgacgccagcattttgcctatacgtcgtagtattccacacttacattccgcatcgaactcacgtcgcgcaaatttggctggagttgttgcagtttgaggtcatggagcgcttgaatttgagcaagttttcgctgcctctacagagcgcgctcgacatgattcagacgcacgcagagttgctgatgagggaaattcaggatgcagaggcgactaaaacacttccagatagtgccctcacctcgaggaagcgtcttgtgctgcacagtgatcgcctggaggcacgggccaaagctgtggattcagtcaagatgcttctccagttcggctttgttcgtcaggcgaagatgcttctcgagattttgcgttactcggccaatgatggagataccaatgggaacaatgctcctgccactgaagcgcttagcgagtgtgagcttctatcgagcctcgtcttagagattgagggacaacgtgagtgggcgttggctcggatgactagcgcgctcaagtgtcctcagcttgatctctgtcgtttcttagagtggacactccgaagctgcaagctggaccgcaacctcgctcagtctcttaatgccttacaagcgactgagaagaaggcagctaagaccatagtggctgctgtacggcgtcccgctgtgcaagcaccaggtactttgaccagggttctcaactcgtcaggtagggcagcatctagtccctcagacctttcatcagtgtgtttattggctcgagtcatcttcaagcaagcgacgattttactcaagatttctgccgcgtccaacggctctggtgtgatggcgcacttgttggagagcaagcgagcgttcgaaaggagtgtgcgggtgttaaaactcgtcgaagcagactatggccgcactcagttgatgttgaaatttgtgagcgccttacgatcctatggacagacccaggggagtttgcaactatctagcgctgacttggatccgaaagtcattgttcaagaagttgtggcgttgatcgagagtatttcgtcgaagcacttccgatactcgggtactaaagcgcttctggcggacgctcatcagcgagaagtcattgtgaatcccctggaattggacctttccatgacaaaactgcagctcgcccgactgcttgtggcccctgagctgtctacggcagctattcaagagaaagagatgacttggtaccgctactacgaagacagtcagcgcagcatagtggagaaatggctaaacgccacggggtccgtaacgaagaagagcttatcatgggaattaccacgcgcaatgacgctgatcacttcggcgatagataaactcagtgggaacccgacgctggacattcagcacgcgatagctcaagtgatccgccttcagtgccagcgcctcgccctcttgcatggctgcgatcgacagacagcggatgcgatccaacatcgcttatggacgaggtatacctcgtctgactcgcctaacgtgacgtgggtttgctgtcacggagcccgagctgaactggctgttgctgctgccgacgctgctgctgctaaccaacctcagacccaaacccaagctcaagctcaaagccagcctcagacccaggaggacaatatcgaccaagaagaagaggaagaggaggaaggactggatcaagcccgcttcgacgaaatgctgactgcccgagccgctcagatacagacgtaccaggtctttgcgttcgagaagcagtgcgcggagctgttaaagctttgttccaatgaattgatccagctcttaggctgtcggcatcctttcgactgcgccaagaacgtgctcaagcaccagagcgcggaggtcatcgaggtgaccaatagtttgttcgagaagtgcgtctccgagtcgaacgtgcagcggctgcacttgcgacggatgaagaagctccagaagactcacaccagcgctgcagcacacagtcttccgttccagctctcgcagctttatctgacccagcagtcagaatcgttcaagcggatgagtgtcggcttccgagttgatgcaatcgtggccgctctaccgagcaccatccgcgtgctgtgtctccacttctctccggaccggtgcttcctgtacgccgcgttgttgggcagcaccaagagacgcgtagcgattgcgcgtatggagtttactgatgttcaaacagttttgcttgagcaattacggaagaggatcgaggcatggagagcgaaatgctcgaaagagacattggcgtatgaagacacacatcaccaggacgagatgtacgagttcgtgtcagtggagcctcatgcaacagaccacagtggcgatatcttggaggaggagttcacagccatcatcaacgacacaatcgatttactcgggcctctgtttactcactcggcgatgaaggcagagctgaaaagcaatctcgctggtaatacgctcgtacttttgttggatcaagtgctgtcctgcctcccgatggaggccctcccagctctgcaagctgccgatgcgatcgcgcgggacttttcgatccaaatgctgcatcaacggctcatggcgctgaagaagcagccgctgagacccaacgaggttcgcgtcattgtagatccacacaaagaagaccctgggagctccagcggccagaccataacgagtgtcgtgaagcaagctggatggaaggacgccttcgagcacggccagatcccaagcgtgacggactggcagcaggcgcttctggctcgccgtggcggcggactcatctacgtcggacccaatcgcgtgctcggttcgtttctgccgctgcaacaacttacgggcatgaacgttgcgctcacgtgccaagcgatgatactgctcgaccacgcggaaaactccaagagttcacgtcgacagagcaaaatcgacagcgagaagcccgcgtgggagaaagaagtcgagtgcgatccctactgccgcgcgctgctgttgacgctctgtggcgtgaacgtgctgaccatcaaccagtgggcgacgaccttcaacggcaatcgacggctggccaacggcctgctccagaacttgggcaaaggccactacatcggcaaagcgctcaagaagttcagcgagtccacggtcgcagcttctgcaagcgcgacgtcactaggttcacccccaaccgaccccagtagcccaatagcagcaaccgaaggctctgtaggcagcaaactgcagctcaagaacaggttccgctacaacgccgtagtgtacggactggcgcatctcagtctcaagagcggcgactgagctgtaagataacaagttgcctttttcacacgtcgcagatttttcccgtcgaagcaactcctgacgcaagtgtgtggagaatgatccagggtggtagagctaaaagtgtggattttacttttttgtgcctttttaggacttttatgctgttgccgttgtaccggatcgaaacgaattagttttcgtgttatggcgccgctgttcacttcaagatcttttttatcatctatacgctgctttgtcattttagcaaagtgtgcacggcacagtcctaaatggatgatacttttctcagtagcactagcaacgagatccaaggaaatcaacccacgtagttatagaaaattagaacccgaggacgagatccttagtatcctgcagtcattgcacgtaggattgataaaccgacgaaaaatggtaccaaggcctaaaaatctgaatgaaatgagcggactgtgacggcatcgcaatacataatacagtatccatttatatttatttatttatcattgtatgaagtgctgctccataagaagcctcatgttcgatcattagcttgtgtattttcttaatatcacgtcctaacgcgtgtatttcgtggcgccagcatcattttctctaaacatttctatttcaggtggagccttactcagaacagcaagtcctaacatttttgtctccatgtagggcgaccagaaggacttcgaatgcaagctaagaatacagccagcactccaagacttgacgtgtaagacgaccataaaagtataagacgaccaaagcaccccaagccgattgtaccaagactactaagtaccgggtaagcaccaacctctgctatcatggcagcaggggagcgcttgcgcaggtttctcgaagcacaaggaaacaagcttcaacactcgtggtttgcgctacagctcacccactacggcggtaaatactccattgagcggatgttgtccatcgacgagtatactcgaaacacgtcgctaattcgtgtgacgttggcgattcttggagccccactcctcatttttgccctcgtgataggccaagaaagcgtctcgctccagaatccgagtgatggttggcaggcgaattaggggacacttggagcagctataggatatgctgctgcgtgccagttcggtacatacatggctcgatcttccggacctgtcgccacggcagacagtagtattttgctgtctgaaggctgttggcttcgctgcagtgggcatggcaggagcggaggtttgggcatttcccattccgtttttcatcctgtcgctctcgatgatatggcccctgctgctcgtgggcgctttacgtgtcgccattggggccgatacgtttcatcaagctcgttctcgaccctaacaactccgtcagctgaacaaacttggaacgatgcaaggatttttgtgcgtagtgtaccccgcctaccagattctcttcaagaccgcgaaccataccaactacgaactacccgttctcctgttgctgtctgtgttcaaagtcgtcatgaaggcggcattcgtgtcagctgcagctcataaagaagacattgtccccgaagaagttgtgctcacagtcgactttttcgatgcgttttatcgggccactttcatgcccaacctgtcttggacatcgctcgtagtggttctggtcgttcagtttttgcaaaccgtgctcgaattgcatgatcttcatcgacgaactcaaagtatcctggcccgtcttcacaagactactggggtcgctataaacagcacaaagcgtgacctactctcaacacttcgggtgctatgctacttcccagaaccacttcaaaggcaagtacgcccagatattcgcgtgcgctcctccgttcgtcaaagcctatctcgagaaggaagagatgtgctcgacaaacttggcagctatcggcagaatgggatgagtactggacagacaaacaactctggtcaagtatgccctgaaccgtctgcacggtatacgatatccggttcatctagtagaagctcaagcgtaatgttcagtgcttcagcgaaagccgccgacggaggcgtgcgaaatgcgcttcatcgcagatattcactagaagatgggtccggaattctgcacgaagctctcgaagtacttttcacgtcggaatgccttgttttgatcgagttcgtggagatcgtcatcccactactctatggtacttacgtgctagccatggctcacttgcccagcgcgctgtaccatacggaaatgctcgggattactcgcgaaaatgttgggggcaagggtattccttaccgcactgctggacctcctatccttcctgcttctagctgtgatcacgatgcgcaattgtggtatccaggcgataccgcactgctggacctcctatccttcctgcttctagctgtgatcacgatgcgcaattgtggtatccaggcgatataccacaattgcgcatcgtgatcacagctagaagcaggaaggataggagttccagcagtgcggtaaggaatacccttgcccccaacattttgggcggcggccacacgccctcgcactcgggctccaagcgctcgcgtgaggagctcaacatgaaggagaagaagcgtatgttcaagctcaacgaccgcatcaaccagctcaagacgctgctggacgaggccggcgtgcagtccaagaagaacaagcagtccatcctagacaacacgtaccactacatcggcataaaatatacgcgtcaaccagagcatttcatactgtaatgctctggttgacgcgtatattttatcctccctattagattgctgagcaagatccatcacgtcacattttcccctagaaagttgcctttttcacacgtcgcatagttttccatctaagtacgattgttatccctgacagtacgatgtctcggcgtacggtggcgctcttcggcggcgccttggcgctgcgcctggcgctgctgctctacggccacgtgcaggaccagctcatggccgtcaagtacacggacgtggactacgacgtgtactcggacgcggcgcgggagatggcggagggaaactcgcccttcgaccgcaccacgtaccgctacacgcccgtgctgtaagatcctggcgggggtagcaacaggagttggttcgtttaaatttttatctaacattatttatgtatttatcttttatttgattatttttttagagcttttatgctgctgccgaacatttacgtgcaccaagtgttcggcaagttgctgtttgtcgcctgcgacctgctagtgggctacgtgctgtaccggatcctgaggctacgaggactcccggatcaacgtgagaccaagaaggcgtattttttaatctttgtttctaataatttttggttcgttgttgttgctgggatgtagacgctgtgaattactgctggtgagttgttattttcgggtttatttccgttgttgaggtgctgacaatcgtggcgttacaatggattggacagtgtgtggttgtttcacccgttctcggtaaatatttcgacgagggggaatgcggactcgattgtggtgctgctggtgatgctgtcgctgctgctgatcatgcgcaagcagcttgttctctcggcacttgcgtacgtatatcagtcactgttcattctgcaattttacattgtggtcgataactgcatttttgttttttgtaggtatggcgccgccgttcacttcaagatctatcctatcatctatgcgctggcattccttgtggtacgatagttctgatttggagaggtcttacctcagcttactaacgtcaatcgtttcgctttttgttttcgttctcaatcagtttttgaatggagactttcgtgcgtcgaatgccaagtgggccaagtcctgcggatcttctgcgtgtgtttggtggaagcttgccgggctgcttaatcgtgatcgcctagtttttggcgtcgtgagtggactattcttcctcgtactggctggtggattctactacctgtacgtgtaaatacccatgctatggatgcggcaatgcaagctaacaatgatttcttccttgtttcagctacggctttcaattcctttacgaagcatacctctatcactttacgcgtacagacaaccgccacaacttttccgtctacttctacgatctgtatctgcgatacaataccccgtcgggtttcggggtcgggcttctagctttcttgccccagcttacgtcactcgtagccatctctttcgcttatggccgtgacttaccgttcgcacttttcgcgttgacgatggtcttcgtgattttcaacaaagtgtgcacggcacaggtacgcagccaaggtatatgcactcatgtacaactgagctctgccttacatcatcgtaatattcttttgttgcagtatttcttgtggtacaccgcgttcctgccgctgattttcccactgacaagcctgagactcaagtggaagggcctagcaatgattgctgtgtggcttggaggcgaggtaaggcatttcgtaagtttccaactccacggaaatctcgtatttaaccttgcacactgttcttcctcgcagctgcactggttgtactgggcgtactatctggagatgcaaggctcaaacacctttttcccgctctggttagctggactcaccttcttctcggtgaacgtaggcgtccttgccacacttatgcggcaccactccttcacgccgctgttcgagagaggcggaatcttccagctggtaccgaatggacgaccaaagcagcagtagctgcagatgatactgttcaatttggtcacgatatctgcaactcgggtcacacatagccaacacgaaaaggtaaaattcaaaatgctagaataatgaccgactctttcaccatgagtcacgggtcatcgatcattttggtagcacctagctaggctacaagtactattcagcctaccaccacagatgctatttgtcttttcttagcgatgcttctatttctggtaattcattataccacaggtctaaggacggattgcatgaatttcttgctcattttagcgctggctctgcccttgcaaaaacagctaagaatacatcacacaacttcctgttgctcaatatacacaacgaaatacagtgtgccgcgcagatgacatattcgttcaagaccactcagacgaccgcatctctgactatgacgacaaatgaacgcttgcacggtcttctcgaagtacaaagaaaacgacttttagacgcgtggttcgcactccagctcacccactacagcggcaaatactccatcgaacggatgctgtccatcgacgaatatactcgaagcacgtcgctgatacgtgtcgtcttggtcgtccttggggtcccactccttgtttttgcccttgtaataggccaaaagagtatcgcgctccaggatccaagtgatggttggcaggcgaatcatggtttctgggtccgtgtgggaattattggagcagtcatcggatatgccgctgcatgccagctcggtacgtggctagagctttcagacctctcttcacggcagacagcagtcttctgttgttataaggcggctgggtttgtcgctgttggcatcgcggcagtggagatgtgggtctttcccgttccgtttttcatgctttcgctctcaatgatttggccaatgctcctcgtgggctctttgcggctcgtcgttggttcccattcatttcagcaaatacgttcgcgccaggatcacctccgtcggttaaatagacttgggaccctgcaaggatttctttcagtagcctacccagcctaccaggtgctgttcaaggttgcgaatcacacagtttatgaactacccgttctgttgctgctgcctgcattcaaggttgtgatgaaaacgatattcgcgtcagcagcagctcacaaagaagacatgctacccgagcaagttgtgttcacggcggtcgactttttcgatgccttctatcttgcaactttcatgccaaaactatcgtggacatcgctgatagcagtcctggtaatccattatgtgcaaactgcgctagaattgcaggacctgcatcaaagaacgcaaagtatcctgacccgtcttcacgcggcgactggcgtcactaccaacagcacaaagggggacctacttgcaacactgcgggaattgtgctacagctcagaaccgctacgaccgcaaattcgcaaacacattcgcgtttattcgtctattcgacaaggattgtctcccaagggaagagctttcctcgtaaaactcggcagtcgccagcaaccctgttcgtctactacctacactagtaacactactcaagtgatgccaagatcaccagcattggagatgattcctgaccgtgaaccgccttttgagagctcaaacattatgataccgcattcagaaaatgatatcgacagattcagtcgagagtcattcaagcgaaggcattcgttgaatgatagctcaacagttctgcaagaagctctcgaagtactgttcacgtcggaatgccttgttttgatcgagtacgtggaaatcgtcatccccatactctatggtgcgtatgtgctgggaatggcccatttgtctagcgcgcagtatcataccgaaatgtttgggatcactcgtgagaatgttggaggcatggtgtcacgaatgttcctttatgggattctagagctcgtatcgctcatacttctagctgtgatctcaatgcgcaattgtggtatccagatactgtatcagctaggctttgtgctggagacgcagatgcagttcgtattgtccaaactgatgctgtggatagagttcacgttaacttaccgcgttgtgcactttggtacgtacatgctaaaaacttgtctggatacaatcagtactctctgaccctgtgtgatacttcataggagctgatttatcatttcaatttgagtggatgaagcagtcaagcggagaaacttagctagtggtactcctaccttagcaacaataaggaacacgccatgagctgacgacatcgatcttcgatccggaaagcaagattgtatcgagctcagtcagaccttagagttcgggtcactttaagccagttaggccggacaaatcaccatagcaatcggatattggggacccgggtggtggacccggggggtttcgcagttcgaagctagcttgtacggatacccttacagagaaacgatgcactcggcatcccctgcgcctgcttcgcagccgcagcatctgcctaatctaccacggtacaaccaagtgtacaaagtttgatcgcttatttttaaaggcattgccagttcatatacatgtatcgtcactccaacgaattggtacttcaacgattgggtttgaaaaatccaccgtgatgattctacctcctcctgctcgtcgaatgagggctccacggatttagttttaactttagttctttgtagttagtagaacggttatcaacagcgaggtaatcaacgtaatttccttccttcctgctactgaaatgtgcgctgatgcccaggcagaatcctttattgtttagattgcagtgttgtgctcggaaacttacaggtgacgataaaacaagaaaaaaaaacgtgcattcgaataattagcgctgccaggataactgctcaaccaaacttgcaggataacccgatgaagccagcaatttgtttcaagtttgatgagttaaaactaaggtctagcagatttcgatcgcgtgtaggagtaggatacaccgggtgttcgtccttcgctttgacgatgtccgcccttcctctcgcacaggatgcgcggcgtacagcgacaacgtaggagcattcaaactctgtttaataaaacatggtgcaaccgcacacatattttgtccgggtcgcctgaagatctaacaacaacaaaaaactgtcagcttcgattcgtccaagtgtgatattgccatttatcaagtattaatctgaaggtactgtatgcatgtagcattaggatgatctgaactaatatcggtaacaatgtactttgaacttgttttgacaagaacaggatcaagtagtagatcattctacaggtggatctctgcgggtcgcactgtagtctcacacaagacaagcttaaatcatccaagtcttcatagataaatgcctaagctaagtgcagctagcctttagccttttttcgtaccaccaggagcagctctttttgagtctccgctgaatgaattcgttcgtcaccgaataggacgtcaccgcattgccggcggatagagttgggttcggattaaaaaaattgttgaacgaaaaaaaatcgagctatacttcctatcttggatcgcacaacctaggactttaagtagttttttgcaatgttttagtggaatgttttatctaatccatccggattaattccaatgagtgtggggattcacacaatatcagcccgccgacagtttatgtcacggcaaactcagctgaccacacgattttcaatatctctctctgagaaactatgcatgcagaagaaaatctatgtctgaaagaggagggtataagttatgactcataacagatcgaatcgataattttaccgctaatggaatgagtaagtactatgttgagtgctttgaagctagtagtataacacgatgcagtgatgtggcaccagttgtgtccaaggttagcatcattagcaccgatgcctcatattaatcgaaagaatacaatgcttgctagtacacaatacgttgttcgtcgtagtagtccgctaatacacaatacgttgttagtcgtagtagttgatggagcctcacatcctctgatggcatctgacataaatctacagtagaaggaaaaaaaaagaataggcatccatcaaaacccagaccgattgctgtatgatgttgtgtgaaagttgtttgatgtcatccgcacgggggtgaagtgacgaatgtagcgtgaatgtcgttcgatgtcatccaaaaaccttccccaatcgacagttcttcgaactgcgaattgtcgattcgcaaaagtagcatcgaaaccggagatcttttcgctagcaactgctcggatacggtgaaagcatgaactgtgaacacttgaggcacgaccaactctacataccgaattcgttgatgcactgtagatccgagatacgacgtctcctgtaagttgttgttttagcagtgacgcgtatccaaatacgttcgataaatagccaaaataggttcatttcgtagttgcaattcctgctcaacgacggacgacactctttaattcgtgtgtccaggtacgtctatttcaggtgtcataaaaagtttttgctatgcattccatatgcacaacggctaagaatactcaacttcaccatttgaatacaccacacacttatcgtgcataagctgtttgtgtcaacacaccccgctgaagttgtatctcggagaatgacgacaagtggacgcttgcacgaaaagctactacgcgcacgtttcgcactccaattcacccactacagcggcaaatactccatcgaacggatgctgtccatcgacgaatatacacgaagtatgtccctgattccggtggtcttggtcatcctcggcacactactcctcatttttgctcttctgaaaggcaaagagagcatcgcgcttaagggtcattcctaacgagatcaccggggcatgatctcggctgtggtttggggtggaagtgaaacaggcctcttgtcttgcccggctgttaggcagatcgtaaagccacgctgcgtccgtccgttgcagtcgtcgacgcaattaacacctcgttggccgtcagagatccacctgatctccccctgccggaacgtccgcttgcacatccgtcccaattttgttattactcgttaagcgcaatagaagctggatgtccaccaacaactacaactcgtcctcgttctcgtccactgcacctgtcctcgccgatcgcccaccaactgtccacagatcccgcactcgtacgcccggggagcagctcgtgcctcaatgcacgtgccctcgtcgcgctctgtgccgcctgcgacccaatcagctgactcacgctcgtccagttacagctcgctcgtgcacacagtgaacaggggagaaacctcctgtcaccgcttcacgcgttctcgtccagacccaacaggggacaaacctcctggggccctctcgtacactcgttcgcactaacgatggacaggggagagacctcctgccaccgctttgcacgttccgttcttgctccgctctgcgtccttggccgcaaaatccgttctgtcgctcctttccccccgttcttcaatgtcgagtcaacgctggtgtcacccaacgcacacactcttcagtccgatctggagctcgccgtttttttcatactggggtccagtcaaagtcaccgattctcattggccaattttcctgccaccgaaccagaatcctgtggccgctcctgtgcttccgactcttcccttcgccgtcagctcgcacgacgctgggtatgccggcttcaacatggcctgcttgcgctaccagtctattacagaaggaggcatgatctcaaagccgttcctaagtagatcgtgatccatgtccaaatacataacgaaaggctcgagttcgcgttgagggcggccgccattatgagcttcacgagctgtgttcgtttgcatttgcgatcgaacgctgctttgcacttcgacaatgcatttgatgcaagctgcttcaatgtggctacagtagagaatgactgcgtaaaactgcagtatacagccttctaggttccacaatagctttaacgaactccttgcactcatagagtgtacactcgggcgaacattagtcgaaaccgtggctacgaaggctgctggagtctaaatcctttgacggcatttggcagtgatccgtgatccgagattggggcatgagccattgcttggatcatggggtcatggcaccaggctccatatgtgtctattttagccaatcaggtagcataattacgggtcatgatcctcacatgatcccggtaggaacggccctaagaatccgagtgacggctggcaggcgaactacggattctgggctcaagtgggaattctaggagcggtcatcggatatgccggagcaagccagatcggagatcttccggtcgtctctatacgacagacagtaatattttgttatttttaaatttaaaaaggctgctggctgtgttgctgttggcgtggtagtgggaggaatttccataaatcagtgattttcactgagatttgacaaaatgattgtgatagtttgcctgaaatcactgatgcagcatcagtagtatcgtactagcgcgtctatacaatttgcaagtcaaatgtagacctatagtaatactagaaatagtacatgtagatagcatgttacctactacaactagtactacataatatagtatcactgtcgatgttattaatacatactccggttgctacggtacagtagacaggcgaccccttcctagcggttaaggtgtgggatgtcgcaactaccagccacaaactggggggggggggggggggcttgctgcgtttagtgcctttttggtgattatactttttgcactatacaacttgtctggtgttctgcacaaacattaaagcaactttattcgttagtcgtctcgaggattcactacgaacgaaatacaagggtccagcttctccacaattgttttacatctgccccctccgccgaaacccagatttttttcgcgatagaactacgcatataagctcaacggacccaggagatggtgcattcactaaaataaaattgtcatgcgcacaacgtattggctttcatgcatcgatagtagcttcagatgaaatatgttagctttaatagtccaaggttttgtgaagccaagtacccagccctataaagtgaaaagtagcaatgaggacagccttgcggagtgccaaccgcttcaaggtcctccgtcacacaggacacacacctgttgtgcgagttaagtttgcgtccgcagaagatgacaatggtcgacaggcgaaaggctcataaacatcctggtaggctcttagtcaataatgtagcaggagatacgttgtaatggaaacgcaaatttacataccacagatactgtaggtaacaggtaagtcgtagatttcagagcttcttcatgcaacgcgcgcgactttgtatctcgttgaattgcgatagcgatagtgactgcgccgctgtggtgaagatgctcacactaagttctatagctatcccagccaatgcatagctctcgtcttcatttgatcggcttcaaatagctgcactagcagctttactcctaccccagaataaatgtagtatgtaaatagagacatcttaccaaaaaaataaacgcagttcgtataacagtctcgttgatgatgatactatattgtgttgcgatatagtaacctttgccaatccaagttggcagcggtgtaaagcaaaacagtgtggagtaacttaagtaacatccaaaaatcggaaaataatttctgaaattagtatttagagcaatgtggatttagtgcagagcaaactcaaatcactggtcagtaacagactgtatccgccggcaacatgccccaagatccgaagcgtgggtttgccgctcgcgcgggtgtgctcgatgcacaccgagaagggcgtgactgggtgctggttgccgactgcaacggcatccctcccactactgcccgcaacatcgtccagcgccaagccgctgatgtcaagaagagaggcggcgcgcgggcggcgtgcacgaagtgtactccagaaatggaggaagctctcgtgggctacctggaagacaactgccagtacacactcgtgcagatgcaggaaacgcttgcgttcgacttcagggtgcacatcagcacttcgttgatcagtaagaagctttgcgataagctttacactgttaagcaggtacgccttcaagttattatactatcacttttaccatctactgtactaagtatgttccctgtgataggttcgcgtagagcccgagacctgcaataatgctgtaaatatcgagaagaggagggtgtttggtgaagagttgctgaagcatgagcggaacggtgcttttatcgtgtattatgacgagaccaactacaacctgtactgtaagcggacgcaaggtctgtcgccgctgctattcgtagcgagtccatggagtatggaacttagatgtttgctgtggactaaatccacattggtctgtagtaatcctcgaaaataaatttttgaaaaaaatatttttcgtatttacgggactctcggctttgccttacactactgccaacttggattggcaaaggtgtagtgtatcggcaacttataaattggcggattcccacaacgtagaaagacaaagtacttccgcatccacctgcaaacattgtgtgcgtcacaaggttttcggttcatgttcttagtttaatatgtcggattccatcggtactcagttctttcaagtctcttaccgcggcaactctgctcggttgtgaaggggggaaacatgtcgatgcatagttaagtaggctacggccttcgtcgtggtgtccgcttccttcacatcgactggggccttacccatcagttcggaataatatagtaatcgaaagaagtgaataaatactactgtagtattactatttaccaaatcactgagtcagtagtttcaagctatcacaatcattttgtcaaatctcagtgaaaatcactgatttatggaaattcctccaaccagtggcagagatcttgggcatttcccattccgtttttcgtcctttcgctatccacggtgtggccagtgctgcttgtgggatttttacgagttgttgttggggccgaagtatttcagcaaacaagttcgcggcaagaccaactccgccgagtaaacaaagtcggcatgcgtttctttcagtagcataccctgcctaccaggtacttttcaatgcagcgaaccctatcaagtatgaactatcagcgatgctcttgatgccaatattcaagctcgtggtgaaagcggtctttgcgtcagcttcagcacatgataccggaacaagttgtgttcacggtcgaatttttggattcattttatctggccactatcatgccaaatctgtcttgggcgcagtgctcgttattcaatatgtgcagacagtgctcgaattgctgggtctccaccaacgaacccagagtatcttaaggcgccttcacacaatgtcagaaccgatgccaagagtgacctactcacaacactccggctgctgtgctactactccgaaccactccgaaggcaaatgagcgctgatatccgtgtgcattcctcaatattcaagcgcttgttaccagagggaagaaccgtagcggagaaacttgacattgtcgacacgaagttgattcaaattgtgcagaccaaaaattgtccagatcgaaacgctactagagctcattttgttcggtatagtcgccgtgatcatgaagagaaattgtgggatccacacggtctatcagctaagggtttgtgctggaaacgcatatgccgtccaactgatgctgtggatcgcattcacgctgacttaagcactttggtacgattgggtggtctaaaggctgcggccgaaggatagcatctcactgtaatacttttacgtaggcgcggatttttctctatggtttgagtggatgaaaaaaccaagcgaatcctaaacttctgaagcggaccataatgggatacatgcattaacttaggaatcaaactactggcggccttcacacggccgacgactttcgaaacgccacaacaaatccaaaatcacgccacagctaaggccgaaacacatctgctatgctgtcacgcaccagcacagatcactgaccgatgggcttcaggcgagtcttctgctcttccacatttgtcaacggcgcatagcgcacattattggccttcagtcccacgaggttcttgaggtccacaacctgcacgtcctcttcgaagtgcaccttctgcggttttgcttggaagagctgcggtgccttgtacttcttgagtaacagagaggaaatcaccaccgacacggacgaaaacgccatcgccagaccagcacacgcaggcggcatcatccggtggatcagagggaagaacatgccggccgccagcggaatgcccaccacgttgtacacgatcgagaagaagaagttcaacttgatgcgcgagaacacgacgcgggccaagtccagagctaccaccacgtccgtcagagcgctcttcacgagcaccatgtcggcctccgccttggcgatctgcgtgccggcaccgatggccatgccgatatccgactgcgccaacgctggcgcgtcgttgatgccgtcgcccaccatgcacaccacgcgcggcttcagcgtcagcgggttcacctgcgactgcaatgccttgatctgagacgccttctcaccaggaagcgccacggccttgacgtggttgatgcccatctggcgcgcgatcgcgctggccgtgcgaaggttatcgcccgtgatcaaccacacgtctagccccatcgacttcaggtgcttcacgacatccgccgcttcggggcgaggagcgtcagccaacgcaatcacgccaaccagcttgttctccacgcacacaaccacaacggtttttccctcgagttccagctcgtgcatgtgggcgcgtatcttctcgccgatctcgatgcccttctcctcgcagtactcggagttgcccaccatcacgttggccgctgtggtgcgtgacgtcacctcgctggcagccacagtgccttcaatgccgcggccagggaccacatggacatcggtcggatcctgcagttcgagcttctcatgttccgtggccgtcacgacgatggccttgccaagaacgtgctcactcacacactccaaggacgcgccgtagtacagcagctcgcgcggcgtgtacgcacggtcggccaccaccacgtcacgaaccgaagggtggccgacagtcagcgtgccggtcttgtcgaacacgatggtgtcgatgtagcgcgcggtctcgagcgcccgaccgcccttgatgagcacacccttcttggcgccgacgccacatccgaccatcacagcagtgggggtggccagtcccaaagcgcacggacacgcgatcacgacgaccgagatggcaaacaacacagccaggtacatgtcgtcggagtgatcagccaaagcatcctcatccacgcccagctctaccttccactcggtaggaatgaggttgagtgtcaacagcgatatccacgcaataaacgtcatcaccgccatgcccagaacacagggggcaaaaaccgatgccaggtagtctgcatacgcttgaatgggagccttgtggagctgagcatcttcaatcaaggtgcaaatctgagccaaagccgagctttccccacccatgcagctcgactcgatcaccagcgtgccctgttggttcacagttgaaccgaacacgtagtcgccggtcttcttcgccaccggcatactttcacccgtcagcatcgactcatccgtcgagctagaaccagatttcaccacgccgtctgtcgggatgttagcacctggaaggatgcgcagaagatcaccgcgctgcaccaattcgatcgggatttcgcggtcgcgtttaccctcgacgataagtagcgccttcttcggctgcagcttggccagttctgacaacgcatctgctgtcttgcccttcgccatcgactccatgtacttacccaatgtcacgaacgtcagcagcatcgctgatgactcaaagaagtggtggccgtgataattctcatgcaccgccgagccaaccaatgatacaaagctgtatgtgtacgacatggtggtgcctgccacgaccaagaagtccatacccatggagccgtgctgcagacccttccacgcggccacgtagaaccgccagcccacgccgaactggataggagtcgccagcaggaacagcagcaacagcttaatcgatacggaattaaacacaggcgtcatcaacactttctccaccggagggatgtacatgagcaccatgtggatcagcatggccggcagcgagaagagcatggccgtcgtcaagagcttgcgccacttctccacctccgacttgctcagcgcgttctggtccgtcgtatccagcgctacctccgccgagtagcccaggccgttgatgcactccagcacgtcgcgtggccccgtcttggccagctgcttcaggtgcacgtgcgccttgttcagcggcaggttaaccagcaccttggtgacgcccggcagcttgcccacggccgactcgatcttgcccacgcacgcggcgcagctcatgcccgtgaccgtgaacttgagctcgagcgagtcgccgtcgcccggctccaccacgtgcgagaacgtcgccttgtagccggcgtcctggatgagctgccggagctgctgctgctcgtcccggaccaggtcgcggtcgaacgccacctcggccttctggctgatgagccccacgcggcagtgcagcacgccctcggccttgcccacgtggtcctcgatggccttgacgcacgcggcgcagctcatgccttccacgtggaacacggcgcgcgggtggccggccgcgtcgggcacgtccagcgccaggctctgctccttctgctgctgcgccgccttctgcctctgggcctgcagcttgatggccgcggccttggcggcgtcgtacgcgctggcctcgaagcccacgcactccaccatgtccacgagctcctgcagcgtcgcgctgccgggccgccgcagcgtcaccgtggccttgcgctgctcgaagctcacgacggcggcggccacgccgtccacgcctcgcagcgcgttctcgaccgtggagccgcagttcttctggcacatcatgccctccaccgccagctccaccaccagcagcggcacgttatcgtccccgatagcaagcgccaccatcttgtcctcctctcgtcctctcgctgctgctgctgcgctctggtcggacggacgggaaatgagcgtgctgctcgccgcgagcgagcgcgctcaagtcatcgagggtcagcagcgccgccatctcgatggagcggccacggttttgtgccctcggaacgcgccagctggtgtgtccgaaaggcggcacttgacttgcgcttgtatgggccgtggggccggaccagcaccgtcgaaagcgcgagaaatgcaggtggcgccccgaaccagaagacgcctctgggaaggaaattgatggcggcgtcgcggctgagcggacggacaccagtgtacagtcaagacacttgcttcattgtggctgccaccatcgtcgcttgcttgcttcacgatcttccaatgcatttaattaacgttagagacggccctttccctgttcaaatagcggcgagctggtcgtacgtatcctatcggcctcctgtgcagacttctcgtaagctggtaatacaatagcacacactgcaaagtgatcgtagagaagagctcgccagaaggtgtcgttcacgaggactaagaccgcaatggatggagctggcaggtcggctacagcagacgcagcttcgagcaagggcattcgtcgcagcagatcccaagcgggtggcgcggtgcgaacggcgacaaactcagcactttacacgcccggcccggtctctgaatcggccacatcctttactcccgggaactttcgcgaaagcgtccccgtgttcaacaccgaaatgtcttcagctcagaattttgatgctgtatgtgtacttgaaccaaggacctgcagtgttggttactgaattcacactactgttgttggcaactacgcggcgctggtactggagcagtcgctcgaaatctgagaccacatggcatcggacgccaagagtgacgactccatgctcattttccgcttcttgtacgcttgatcgcgacagcttggtgcttcagactcttgaggttcagcctgggtagcagaaagtttggcctttagggctttcttcttccttctcaacttcgccttcagcgctttacggcgtttcttctcgtcttgatgtgcgctggcagcagttgatgcatcaacttgctctcctcccaactgggtctcagactctgctgtctccagttttgccgctctctcttcccttttcttcgccttcttcaacgcattacggcgctgcttaaccgtttgatggttggtatccgcgcttcgggcattgacctcctctgctacctgtatgaccttggaatctactgcgtctgatgctccgagacggcgctttttgccgctaatggacttatgcgtcttggtagaactgcttcggctctccatggagagcgagcgcttcctcttgacctgcacaataggctccacagtctcctcgtccactccacagtgcttctcgtggtgctccatcgccttctccgtcacgagtttcttcccttcgcagacagcgcagatcaccagcatgcgcacgtccacagtgcagatcttgcgatgtttcttcagttcagccgcagtgtcgaagacttcgaagcatagcgagcacttgggcgtccgtggcaagttgatatcaagcacattcgtcacttcactcaactcgaagccttgctgcttcttgctgatccgcatcagtagctcgtcgtacaggtgaatgagcacgagggcgtccgcggcagcgtagtgcagctgactggccgtcagcggtctccgctcccagttggacatctgctgcgtcttggcgagcttccggtgcaggtagaagaacacgagcttctgcagactcagcgggttgtgcgcgcccgccagcgcgatggacaggtcgttgacctccacgacgcccttgcagactgtgaagcaggacgcctgcgggtaggactgcgcgagctctttcaagtcctggaggaagctctggcccagcttgatgatcttcttggacaggaagacgctggtgagcgtgctgttgtagacggtggcgggcaggcggcgcaggtcgaggatgaaaacctcctccgtgtggctggcgtcgcgcaccgcgatctgcagcagcgcgcacgggttggggccgcgggtcttgccccaggtagggcgcgtctcctgtatggggtggctcaaagtcagcgaagtagtaggatattaaccgttttcaacccatgcacggacgcaccgtgtcgagacccatgagctgcgcgctgcgcaagcgctcggcgcagtaggagaagtccttcttggaggccacgaactggatgggtgcgcgcgcttggtcgatcacatactgcggggactggttgatgagccccgtgagccgaaccttcatgggcaccatggcgtccgatgtagcagtgcacttgagctgctgaatgcgaagtgacgcaccgtttcattggctgatggcggctgtccgttataatatcgtttttttaccttttataaggcataaaacatattaaccaatcaatcaacgtggttatgttttacatgcacaacgggttgtctgagcctgctgccaatgcggacagcatgaggacactctgctgacgagcgttgtcgaattcgcacgagtgatcctgtcgcaaacgacggtggagaggcgtggagaagcgtagggatcagttcatgtctgatcctgcaatcaaccggtggatacattcgcggcaaccacccggctcgacagaggatacttgcaccgggtcagctccagtcggtgcagcgtggtgcaccgggccacaccgactggcccggtgcacggtaaaagaataggctgacactctgttttttgtcgagaacatttccgtatgttggttggacgttccaaccaagttggcagcaagttgctgccagcaaccaaccaaccgagcgagcaccagcacgagcatgggccaagtggccaagtctggtcaatttggccaccgagttggaggacttgatcgccaagtccttgggtctatgtgtcctcacagtaacactacatatcacttcggttcgagagcaagcggctgagctgcactaaatgctgtattctgtatgttactgtaccattgcgtgtagtctgaagtagctacagtactgacaaaagtgtttcgaggcgctaagcaacacacgctggatctactttaatgtttagtgccaactacttgttaccacaacatgttgcctgccgggctgcgcttggctggacgcccccgcgccaagcagtctagcgagccgagtactgcacgaggcgctggaaagctcggtgtagggcccccctccgcaaataccgcgtgcttgtgttggccctgtgcgcacaactcccccccagctaacacgcaaatgataccatgatcttagcacacacgcacaccctctcctagctagcaggggcttgcatttcgacggcctcgcacctgccgacgtccgcttgcctcttctcgtctttttcgcaaatgaaggagttccttcaccgattttggagtgttgaacgtcaaatcaccagctgtagctctaagcacatctcaagatttcttactggctggcccggtgcaagcagccactatcacccggctcgagcgattgttgtgacaggctctgcagcatgcagtgtcgacaccgagaactgatcgattgcttgggaatgcaaggtcctttcagtagtcgaggagtctttgccgtgctcacgtcacgttcatggtccgacgcactccaccaagcagtcctttgtgcctggctcagccagttgagctgcagcaccgccgccggattgctccgaagcagcctcgctcatctttggcgttgacgaccccgcgccgatcgcacaccgatacggtactgccactcagtcacacacacgccccgtcgccagctccgttctggcggtggtggtggccgatgtggcgacagcaaaacgctccaacgtcgccgccagatctaaatatccccaaaaccagcggtgtagccatcgcgcccaacccatactggagcgcatacaacccgccgaccaccagaacgcccaatccgcatccaagaggcgcgtgccatataaaactgcaccggctccaatcccgaaattatccaccagctcttctcggcacaaatagactgaccgtctgtagaggaggtctcctgagcccatgacgatggcggcgcgcgctcctccgaccgacaacgcgccgctgctggtggtggagctggcggtggagggcatgatgtgcatgaagaactgcggctccaccgtgcagagcgcgctgcggagcgtggccggcgtggcctccgccgtcgtggactttgagcgccgcagcgcgcgcgtcgagtgcgagcccggcgcccgcgtgacggccgacgacctggtggacgccgtggagtgcgtgggcttcggcgccgccgtgaagccgtcgacgctggagcaggaaggagagcagctgaagcagcagcaggcgacggcgctgacgatcgagctgctggtggagggcatgatgtgccagaagaactgcggctccacggcccgacgcggccggccacccgcgcgccgtgttccacgtggaaggcatgagctgcgccgcgtgcgtcaaggccatcgaggaccacgtgggcaaggccgagggcgtgctgcactgccgcgtggggctcatcagccagaaggccgaggtggcgttcgaccgcgacctggtccgggacgagcagcagcagctccggcagctcatccaggacgccggctacaaggcgacgttctcgcacgtggtggagccgggcgacggcgactcgctcgagctcaagttcacggtcacgggcatgagctgcgccgcgtgcgtgggcaagatcgagtcggccgtgggcaagctgccgggcgtcaccaaggtgctggttaacctgccgctgaacaaggcgcacgtgcacctgaagcagctggccaagacggggccacgcgacgtgctggagtgcatcaacggcctgggctactcggcggaggtagcgctggatacgacggaccagaacgcgctgagcaagtcggaggtggagaagtggcgcaagctcttgacgacggccatgctcttctcgctgccggccatgctgatccacatggtgctcatgtacatccctccggtggagaaagtgttgatgacgcctgtgtttaattccgtatcgattaagctgttgctgctgttcctgctggcgactcctatccagttcggcgtgggctggcggttctacgtggccgcgtggaagggtctgcagcacggctccatgggtatggacttcttggtcgtggcaggcaccaccatgtcgtacacatacagctttgtatcattggttggctcggcggtgcatgagaattatcacggccaccacttctttgagtcatcagcgatgctgctgacgttcgtgacattgggtaagtacatggagtcgatggcgaagggcaagacagcagatgcgttgtcagaactggccaagctgcagccgaagaaggcgctacttatcgtcgagggtaaacgcgaccgcgaaatcccgatcgaattggtgcagcgcggtgatcttctgcgcatccttccaggtgctaacatcccgacagacggcgtggtgaaatctggttctagctcgacggatgagtcgatgctgacgggtgaaagtatgccggtggcgaagaagaccggcgactacgtgttcggttcaactgtgaaccaacagggcacgctggtgatcgagtcgagctgcatgggtggggaaagctcggcgttgtctcaaatctgctcgttgatcgaggaggcacagctccacaaggctcccattcaagcgtatgcagactatctggcctcaattttcgctccttgcgttttgggattggcagtattgacatttacgacctggttactgctactctcgatggacattattcctgcgcagtggaaacttgatctgggagtgtccgtcagtactggccacgctgatgacttctttctgtcaattctgttcgccatctcggtcgtcgtgatcgcgtgcccgtgcgctttaggactggccacccccactgctgtcatggtcggatgtggcgtcggcgccaagaagggtgtgctcatcaagggcggtcgggcgctcgagaccgcgcgctacatcgacaccatcgtgttcgacaagaccggcacgctgactgtcggccacccttcggttcgtgacgtggtggtggccgaccgtgcgtacacgccgcgcgagctgctgtactacggcgcgtccttggagtgtgtgagtgagcacgttcttggcaaggccatcgtcgtgacggccacggaacatgagaagctcgaactgcaggatccgaccgatgtccatgtggtccctggccgcggcattgaaggcactgtggctgccagcgaggtgacgtcacgcaccacagcggccaacgtgatggtgggcaactccgagtactgcgaggagaagggcatcgagatcggcgagaagatacgcgcccacatgcacgagctggaactcgagggaaaaaccgttgtggttgtgtgcgtggagaacaagctggttggcgtgattgcgttggctgacgctcctcgccccgaagcggcggatgtcgtgaagcacctgaagtcgatggggctagacgtgtggttgatcacgggcgataaccttcgcacggccagcgcgatcgcgcgccagatgggcatcaaccacgtcaaggccgtggcgcttcctggtgagaaggcgtctcagatcaaggcattgcagtcgcaggtgaacccgctgacgctgaagccgcgcgtggtgtgcatggtgggcgacggcatcaacgacgcgccagcgttggcgcagtcggatatcggcatggccatcggtgccggcacgcagatcgccaaggcggaggccgacatggtgctcgtgaagagcgctctgacggacgtggtggtagctctggacttggcccgcgtcgtgttctcgcgcatcaagttgaacttcttcttctcgatcgtgtacaacgtggtgggcattccgctggcggccggcatgttcttccctctgatccaccggatgatgccgcctgcgtgtgctggtctggcgatggcgttttcgtccgtgtcggtggtgatttcgtcgctacttttgaaacgataccagcctccggtggttggcgaagttgatctgaagcgccaggtgaaggaggacgcaaaggtgatcgaactcaagaacatggtgcgccagagacttggaccgtcacacaagacgtacgctcccttgaccaattctgacgaggtacgacatctgatgtaaattttgtttgctgctgagcgtgtttcactgaccttttattgtaaaatatttttcgtttccagtgggattgaaatccaacacgcgtacagcatcgaagaagtaacagtaactaaattaatggagctggaagtgtggtagcgttcacgatagaccatcgtacaagtaacctccccgagtaatgctaacgttagtatcctttttgcccggtcttcgctatccaaagactatggagcttcgcctttgttgatcttccttgtcactatcgtcgccgtcgtagctctgatcatctgttacttggctccttgtggtccgtttgcccttcgtcatactacgtctttgtggcgcggtgagttgctgtttctcgacgtgtgcccattcttgaccatcgagagaggcgtcatggtgattcaataccgaaccgactttgctgtcttcatcacagaactcggcgagtagcttcagcctagcggtggcccagcgagatcgatcttttcgctcgctctccatttgctctgcaaccaagactgtaagacaattgatcgacgaaatttggtgggctagacgcaccttgtagtgctaggacttgttcactgagcagattgatctcatccttagcgtcctgtgcacattaaccgtcgtcaaaagtaagtatcaaaagctaaagctcgcaatccaacctacccgtaatacaatttgcagctccgaaatatcgctcttccatcttctctctttgcgctggagccctttattcatcttcgtgttgttcgacatgaacaatgttttaagctaagccgaaggaccagaaagtagtaaaataacaagggacgaacctcggccacgtggagtatttcttcctctttagtaacgaaggcgtgctggatggcctcgatctccttgtccttgtctctcagcgcgtctatatgattggtgagctcagatttcagcaatacaacttccttctccaacttcactggcaacgacgccacttgcaattctagtctctcggttttcgcactcagctcgcacgaaagttttcgctgttcctcatacttgcgctcggcttgctgctgctgtgctttggtttcggacagcgcgcggtcgcactcctcgattagacctgtctgtcgcactgtcgtcgctagtaatttttgaacttgctcttcgagttcttgcacctccgcttcgagcttctttgtcgtgttatggctttgttcgagctgctgctggagggcatcaatcgtttgcgagtttgctcgcgtagcattcgtcatcttctctttccagtgacgctcggccgatttctggtcgtccgattgggcttcatgcagacgctcaagctgctcaattcgttgcagcaattttctttgcttgccttttagcgttttagtgtgttcttgatgctcttgtccagcactttgactctcgctgcgcaactgatcgcgttcctgctcgacgcaacttagcttttccaaagcagcctccagctccatcgttttcgagttcaatgcttcctccaggtcgtacgtccgcttctctaaaaggtttaccctctggaggctcgctccattctcttgctcaatctcttgcagagtagaaagctcccgatgtaaggactcattctctgctatctgttgaacgagctggcgctcgagttcctcgttcggtcggctaagtcgctccacatgggtcatttcatccaactccgtagatgtaggcacagtgctcgattctagatctttaacaactttacctgttacctccttcgctgcttctggaggttcgccgctcattccggcgagatggccatgaattacgtcgagtttgctgatggtatcgctaaccggcacatcttcattgagactaggctcgaggctgtcggtacctccatcgcggaatgtagtcaagtcggccctggtgagcccttttggactaccggaaaaatcattgcgaggacgaacgcttgtcatagcaacgcatagctcgcattttcgcctgctgtctggagaagctgcaccgaaacgtgagaacagcgcgtgcattcgatattattgagaagtacaaggaactaccttgctgtgcctgaactttcgttgcccgacttggggaagaacttttcttcttgggtggacttgcagcaccaaacttctttggtgatgcacgtgcttcatgcgttggatgcattcggacttccaagcatcaggtcgcactcatggcaagtgaaacggaagaagtgctaaagttgggtaagttcatgttcatgtgtttatatatcgctgcgatgtctcggactagctgccagctaacgctattgcggcttcgacttcgctgaaatctagatgttccaggtgaggttgagagcgctgtcgatctcctcaacctgctccttggctgggaaacgcgtgtggttgatgcccatgagtcgctgcagcacacgcacgacctggcaactgtagccgaactcgttgtcgtaccagacgtacaggacgaccttgttgccgtcaacgatggtggccttgccgtcgacagtgccagcggcgcggctgccaatgaagtcggaagacgcagcctcagccgagttaacgaagtcgatctggttctggagcggggagtccagcgacaccttggacatgaacgagttgattgagtccttggtgatgccctcggccttggtcgggtcgagctgcaggttcagaatggccagcgacacgttgggcgtcggcacgcggatggcgttggcagtcagcttgtccttgagcgaggggaggcacttgaccacagcggccgcagcgcccgtctcagtgataaccatgttaagcacagcactgcgtccacgacgctccttcatgtggtagttgtcgatcagattctggtcgttcgtgaacgagtgcacagtctcaatgtggccgcccacgatgccgaacttcttgtccagcgcatacagcgacggcgcaatggcgttcgtcgtgcacgacgcagccgagtagatgttctccgagctcgagatcatgttctcgttcacgccggccacaatcgtgggcacgctgcccttggcgggcgccgtgaggatgaccttggacacaccgggggacttcaggtgcaggcccagagcgtcggcgtcgcgccagcggcccgtgttgtcgatgaccacggcgttgttgatgccgtacttggtgtagtcgcacttgtccgggccgtccgagtagatgatctggatgaggttgccgttggcgatgatggcgttggcctcctcgttgaaggtgatgctgccctggaactggccgtgcaccgagtcgcggcgcagcaggctggcgcgcttgatgaggtcctccttggtgcccttgcgcacgacaatggcgcgcagcatgagcttcacgccggggccgctcttctcaatgagcagcctggccagcagacggccgatgcggccgaagccgtagagcaccacgtcgctgggcgtgaaggagggcggcgcctgcgtgagcggagccatcttggtgttgatgagctcgccgagcgcgcggatcttggcgtcgcgcgcctcgggcgtgacctgcgcctgcacgtcgagcacctccttctccatgaagacgaaggtgcggcccaggtcgatgcgcatgtcgcgcgcattgggcgcgtactgcacgagcgccagcagcaccacgagcgtctcggtgggctgcatgcgcttgcccacgtacttgcagacgtagttgtgcagcttgatgaggtcgatgctgttcttgtgcacgaggcccttgccgaagagcacgctcaccacgttgttctcgcggtagaggcggccgatgagcggcaccatgaggtcggccgcgttctcctgcgtcttccactggtccagctccgcgtcgcgcagcgcgttgatctgctcgctggtgagaggcgtctcagacatggtgggtatgtgggggtgggtgggtgaaggtggggtggggagggctggaggggctgtggggccgcttgagctggagagcgcagaatgcggaatgacccacagtctgaagattgccacgctgcgacctatggctatcgttgcgcaccatgcgattactgtactggacaggctcttgcattcgcagcttcaacctcctcctccagtttcttgcgcttgtcgttctgccaatctttaatcagcttgtcaattcgcttggtacggtccctccattcaggattgtgagctctttcaccttggggcaagtgctcgatgaatggacccagcaaggcaagctctggggcccagggatcgtcctgtcttcgccagccatagcccaatccagctgggcagaaagagctgtgtaccgactcagagcccgctctcgtcgtaattcaaacgcgggtgaagctcccccatatggaacgggctggattgctctgggctcctcttgtgccacaggttgtggcgccggttcgggctcaaccagatcgttcaggtcgacctgacttgggtctgcatcaggctcgacatctccgtccacagcctcctctgcgctcgaaaaataaccagctatcgaatcagcgatctggtcaatagggccaacctcgccgaaccccttcattttcgcgaccagctccacacaagcgtcaaaacctggcatggtagtagtcatactctcaatgttaacgcttcgatacccccagcttcttccctaaagcccgagctgacaaattaaacgatccatcgatcaccaaaaaacaatcgataatccctagaacaaaacaaaattagctcgttgttcaaagagcttctgcatttcatactctcacatctttgagtggatgcagatcgacggtttctccacgaagaaaacatgagccccattccggataacgtagctcagaacgcgcctacaccatttagtgtgcgcgttcgcgaaatccgcaacaatcacaacactcactccacgttccatggccacaactagggccttcgccaccagatacagagtaaaatcaaagcaaaagatgacaatcgatcgccgagagccggagatgtagagcagtagcttcggcaggatcacatcagtcccaacgacagtctcctccatgatgttcgcccgtatgtcaagctccatgagaaactcggctttgtaggttttgcggtagttcttcacgcttaggcccagcaacttggcaacggcgtcgtcttgcaagcctgcggtggacatatcgccctcgcggcggtgaacgaacgtgtccaccagctcggatatgtcccttccgcgggtcccaggatggacggcctcctggcggcgcaggcgccaggcatcatccatcttagcaattgggagcccaagctgcttggctgctgcttcaatatcacccactgtagggaggaacctattgtgctccactagccgagcgccgccgctccgcggcggggatttttagttagttggcgcttcactcgctatgctcgctccgctattggagcagactgcctacgcttcgctacggctcgtcggctcgctgcactactctcaatgttaggttagtactacagaggccggggcgggtcctgcggccccgcaatatcgtatgagggggtcgccttcggcgacggaaccgccttcgctgcgctcgacagctaatcggaattagtaggaatcgtacttagtgaataagcgtgacgattttgtgacggacggacagcgcgtctttctgattgattcttaggatagatagcctccgtgtagatagcagctacagcttggcggcgcaggccccgcgcgcgctgcccttgccctgtccgttcgtcatggtcctcttcctgcaccgtttctttcttctcaggcgcccgtttcttttcttcagtaccgagatgcctcccgttagtcaaatatcactttcaagaaacggtaagtgtgactggtctaaagtgctaacctagtcggcgtttcatccaatggctaatggtggcctaaaaatcgacgtgagccgaacagttgttagactcacgtcgatttttaggccaccattagccattggatgaaacaaggatttttttcgcctatcagcgcgctgtactatgtgataaaaaaaataaatcggagggggagagacctccgactctctatttttggaagaaaaaaaaatgtcagggggaagagacctaattcgaggccaaacttgaagcgggcctggtggagctgctaacgccagctaacgccgggccattgtcgctgtgatcgcactccccaccacccagcaagcgagagagcaggttcggagatgagagcggcgcgttctgcttcgttacgagcgcagtccaatgctcctcccattcacggcctcggaaacgcaaggaatggaggagaagaaggcacctcggccaagcgccaagtgactgtcatcgagctcgtagccggtagtttgtgcaagtgcgtgtgttggttgctgctcgtcgcgcggatacggcaatggtagtcacgatcgagctgcgtggccgtaacggacctgtcgccgcatttagttggtgggtttcgccggtctcaatgggctgaaacgatccgagcaaagctcgatattgaagaggaggtggaagcatgccaggcagcagcgttggcggtgatgacgccggtgaagcggccctcggggaggtgcaaatggagtttgatagtgaagacgctggcggtgagacgggtctgaagtcgtcgctcgtcaagtccgatggtaacaactggatggacgacggcgcgcagcaggacgatcttctcaaggacgaatcaccgcaaagcgtcgactcggagcccgcgcactacagctggaagcgcgctgacgggcagcaacgcagccagagcatcgacgaagaggacgaggacgaagacgaagctgacaataacagcgaagtcagtggcaaggcggacgaaagggcggtgcgcacgctgcccacgggcatcgatgacctcccgctgtttgcagatgagaagaaccgcgagcttcatgcgcagatccgcgtcaaggaagctcgcttcgaggcaaccaagcgggagctttcagaaactgcatcgcgtgtggagatcatgacggagcatctgaagaacgtgcagcaagaactactgcatacccaagcgctgcacggtgccaagctcaaggaggtttccagcgaggagcacatgaggcagttggcgcagcgtgagattgggcgagtggctcaagaagccaaggtccttgacgccgaggcagcagagctggagcgcaagctcgcaggtttgcagggctctctgttcaagggcaacgaggccatggatgccttcaagcttcagatgaactggaaccaggacgagatggagcagtgggcagtggcagcgcggcagaaggaagaggacgcgatggcgctagagcgataccggcgggccgatgaagctcgcatcaaagagctgacgctcgctctagaaaagctcactcagcagctcgctcgagccaagcgtgaggtggatgatgaagctacggaaacacaggcgaagcagatcgagctggacaaaacagccgaggaattccgttcgcttcacgctgagcgcgccaagcttgtcgctcagtggcaatccacgctagaggctatgcgagcccgtgacgaagagatcacgcaggctagtgagcagtatgctgtggctcaacgtggtctccagagcaagcaagagctcctcagcgagcagaaacggcgactgaagcagcaggagacggcgaatagcgaagcacaaggtcaacttgcagccaaggaacgagctcagtccaaagcacagcaagaactgcaacagactggggcacgtttacaggcattccgtgaccaggtggaactgctgaagagtgagctatccagcgctgtagctgctctaaaccagcaacgatcaatcaattccaaccgcgatgatcggctagaggccatgaagcaagaactcgaggcggctcgagcgaggttcaaaggaacacggcaggcacttgaccgctgccgtgactccaccatggacgcagaagcactggccaagcaagctgaggctgatctggctgacatggagagcgaggtcaaacgtctggacaaggagatcgctgttcaaaaggatcaaatgtttcgcaagagccagcaattgtttgctctgcggcagcaggaagctagtctggtggcggagctttcgggtgcaaaggccgcagcacaaaacttgcgctccaagctgcgaacgctggatgcacaggccttgcgccagcaggagctcgtttacaatggcgagttccagatccagcaaatggagcgcaaggtggcgcgagcgagtggcgagcgcagtgcagatgaaaccaaggcgcttcaagcccagattcaggtgctgcagatggagctcgaccgtgtgaaggctgagcaggtcatgctcacgacgcagtgcaagaagttggaagaagagcgtcgagcgcaggagcggtctcgcaaagctttggtggcgcagcaaaaggaggtggatgctcagatcgccgagcacgagctgcgcaatgagagctgtgcacatgcactcaaagcggcgctcaagaacaaggaggagctgctgatccagcatgacttacaagcgctagaagttcgccgactgcgtgacctgcttcacgctcgtgccgatgaggtcttgtcgctcgagaaccgtgactttcagctcaagaagagtatggaggagcgcaagcgcgagatcgcagcgcaccaagagctgcagcgtgcggccaacaaagccattgaagaagaacgacaccgcgtctccgtcgagctagcagaccgagaaaaccgagtgcgaaagctgcaggccaagttcgagacgctgtgcaagatgggcgcctacgctaacgacggcgacgacgcaggtgaagctggcaaagagcgcagccaagcctacttcgtgattcgagccgcccagcgccgcgaggagcttcagcgcgagggcgacgagctagacgacaagattcgcgttgctgagaaggacgtgcgcgccttgaagaagaccttggctcacttggaggagcgcaactcggcctaccgtaagagcttccatcgcgcggatctcgctggcgatgacgcacaacgcctcgctgcatttgaggcgcaggccaagatggcggaggatactttcttcaagaagaagaaggagctcgcgcgcgtggagctggacgtgacaagtgagacccagcggctccgtgaagtagagactcagcgcgacttcgctcgagccaacgcgacgcagctcgagggtgccatgtcacaggtagagcgcgaggtgcagacggagcgagcaaagtggggcaaggtcgtcaagaagcttgaccgccagatacgggagcaccggcagttcgctgtgagcgccagtggcatcgacgacgacggtggctggcgtacgaaggagcagataatgctggaggcgctggagctcaaggagatcagcgcgagcctgctctacacactgggccaactggccaacgagttcccagagatcgcagacccgctgcagatggcagtgcgcgaagctgggatgcacattccggcggtgccaccaggacggacggctgcagcaagagccgacggagcagggctgcagcgccccatgtcggcgcgcagcgacaaaaggtttgatgtgcttgctgcaggtttttgttgccacggggatcaactaaccgcgatggtggatggtgtcgtcaatgtgcagcgatcggtcggtgcgcagcgtcggcagcaacgggtctcatcgcagcagcagcagcaatggcttgggtgtgcgcatggctgcgcccgtgagcaaggttcgtatcgggttctaacagctacagtataaccgcattgaaacacccaaagagaggagaacttgtttgtcaaattcaggtctgtgagtgcttctactcttcgctacgctacgctatgtcttgtgcatgcctgtgacctacgcgagcttcttggcgaccgaagcagccacgaagccgagcgcgccgagcgtggcgatgtgcagccacgtcgagaccgtgaagaatgggcagttcgtcaggctgtggtacggcaggtgctcgtgggggcgcatggggcagccgcccttgagcgtggcctcgcgcaggcgcgccatctcgacggcggtctgcgcccactcggtgccgtggttgtggcccttgtccgagagtccggcgcggtccttggcctgctgctcgttgagcaccgtgagcacgccgaagagcacgggcacgcccgtgtccagctgcacgcgcatgatgccctgggacacggcctcgcagatgtactcgaagtgcatggtgtcccccttaatgagggtgccaatgcagatgacggcgtccagcttctgcgacgcgatgaggcggctggcggcgtacggcagctcgtaggcgcccgacacgtccgcgatgaccacgtcgctctcggccacgcccgcgctcagcagctccgccttggcggccgacacgagcgagttcaccacctcggcgttccacttggcgtgcacaatagccacgcgcaggcccttgccgtccgtcttgcggctgctcagcgccgacagcgcgtgctgcttgatagctccggccattgttgtcttcttgatggtgcagtctggatgcggttcttggaatgagctgcttcggcccctcaaggccccctcatcgcgcaacctcttgacatacaaactgcaagtgaaaggcctttttcacgcaacttacgtacagagggtaccgaataaccttagttatgggatacaactagttaagggatacaggaaaatctggccaatcagaactcgcaaaactaggcgactttttacagctcttcccggtgttacatttgatttttgtattgtgctttgcatccagtttgccctcctaatttgtgcactagttagtgctcgtacttagtggtaaatcatggaggctttgaatgcaagttgctcaagtcgtgcttcgagcccgatttggctcggaaatggcactttctaaaagtgcctaacagatgctaatccatgctggatgtgctaaatcatgcaggagatggcgtttgtgcactacttagtgctcattgaccatccacgacttatagcaattcgtactcgagtacgatttatagataagtcatgctccataagtcgtacgagttacagtccgaagtgccaaaaagtatgcaaagcacaatatgtatcaaccatttatgcaatttttccgcagcatctctccgctgcagatcaggtgtagctcataactaaggttattcggtagcggcaataagaaagggttcaacgattcaagtactgaaggaatatactaaactcaagtcaaatcaaatcttgcagagcttcataagtactgacttaacaagataaatgaatcgcattaggtacgatttttacatgaccgacccgcagggctttttgcaaaaagcggagtgatccggaaaccttttgcatttggaacctttgttacaaaaagcggagttcgcaagagcggagttggggcccgggggccgcacacccaagagatctttagacggtgaagagccccatgcagtcgccgtcgccaccgccgtcgccgccgccgcaccctgcgcagggtacgacggacgacactatcactgagggcatgtgctttcctgaccagaagtcgtgcatgaaggctttgcgcaagtatgcagcaatttccttcaaaagcggcatcgtaggggcaaacgagaagttcattttgagtaggagccgaggcttgaactgctctgcaaggcagggctgtgaaagactagccccgtgggatgtggtgggcgggttgcgagctagcgtcctgctggatgtcgatcttgacgctgctcactctgtctgtgtgctaccgctactcttcctaaaatgaaccctcgctactgtggtctgctgcgcttcccgtcctcgcacctgaaccggatgttgtcttcggatgttcttggcttgtcaggtccttagtgtactctgcctcttacaggaaacccgagtatccttcaaactgcgcttctcttcactgcactctgttgcgttccgcttactccatccgaatactcgccacacacggcatgaccatcaagctcgatccaaagcagcacggtggtgcgatgctcatgtacaagtgcgacggcggggatcaatgccgcttcacggttgctgcactgcgatcatagcgtcaaggatcgagcggctatttcatcagtcgcagcattcacctggtactcgtaggaagagatgggaacaacatgaacatagttttggccattgcagtgtgcgctacggagagtgaggagaattgtggatgtttttttcggtgctgttttcaggcgggtgttgatctcaaggccataccgcttttctcggatcggggctccggaattctggccgctctggagagactaaactgcggtggaagtggccacgacaagagaagctgtccctcgtgcgcgtgctgcgcctgcacgttgtattgtgttacagctgcatgataattcataatacatgtagttagtggtgacagttgcggaagaacgagctcaaagttcttgtaagtttgatggtgctgctgggcctcgggccccaactccgctcttgcgaactccgctttttgtaacaaaaggttccaaatgcaaaaagtttccggatcactccgctttttgcaaaaagcccgttggtaggacctgcttaacagcggcgtccgcggccgcgccgacggtgatggccttgcatgggagctaaatgacactgcgccctcgtcacccgtgggtatcttgcccacaccatcaaatgcgctgccgcggcttatgacgacgccctacatgtccaaagcgcgcggcacgcactagctacgcctcaggtacagtatgtgcggcagctcgtttgtaacgggccaggtgtgtgtccgttactagcttacacgtagcggtgaggaagcttagttaagactcggatttagtgagaccaagcagtcagtcttgggtaaaaaaaaaaaaaaaatcaactctgttttatgtaaggaccagggcggctacccctggtcacatgtgagccactcaaatgcagttcaacgcctgattggctgaaatggggtctggctcccccaattcagccaatcacgatgactgtcagtacacggctagcgtgtactgacttaactactttatgtactgtcaatctacctacttatgtaaatgggacccattacatcaccccctctcaaagttgcgcttacgttgcgtaagcgcaaaagacacatttccgaaagaacacccgaagaacaccatggacgaccgaggcggcggagggacggcgctcgtgctaccgagcgacacaggacgacgcaagcgcagcaagcttacacacaccaagaaatctcgtcggcgcacacgccgaagcaacgcgcagcgccccaagtggctgcggacatcgacggacacccgaagggacggcggtcgtggcaacgacgcagcatgggaagcgacaacaacgcttgaggacaagcgcaactgtgatgcgcacagagcggagacccggcgagtgtcgagacacaggatggcgatcagcgtggcgtggctcttcgcgacgatccttcgaagtaactcccgacgaagagtcacgtaaccgtcgactcgaaccgacgtggcagcgagaccagcttggacatcttcgacaccggcgatcatcggtggagcggcgtagtgggcaagcgctcaccgtgctgagctgtgacgcgcgggttcgatccccacgcgaatccttcttgccacttgccatgcgcagtcgctccaagcttgatcaggtcgcgcgcgtcgtcgtgcggactcgaagtccagctagcgcagtggtcgaacgctgctccaccaaggcggaggtcaccggttcgagtccagcggtcgtcgtcgggttttcttcttagtcttcgcggtgaacgccaccgcgagcttgcggtgggggtccacttccatcatcacgctcacttgaggcttcagcttccgcggggagctccgtggtctcttcagcagcagcgaccttcgcctcatagtcacgaacaacatcggggacaccccgaagaagagctgcacgcgtctcccacgtgtcctcgtcaggtggaaacccaaaccagcgtagtcggtaacgtcgcgcggctgggatcgcacgaggagctcggactggattacgcccacgcccgtttgcacgagatgggccctcgtggtgaacgatgcggtccacaatccagcgcgcttcactcgccgagtcgacaatcggaggaggaccatcgcgacggtacaggcttgggtgatgggtgttggcgtcgcgagtagcctcgggtacattacccgccagtgaatcctggtgatcagaggtcggaatatcggcaggatgatatcgcttgaggcgcccgacgtagaacgtcgggtgaagacgcagcgacgacggattgtccagtgtgtacgcgtcgccgaggaccttgatcaccttgaacgggccgatgaagcgcggcgtgagcttgttggcaccgaggttggtcacggcggaggagcggatgccttcggtagacagttacacatggtcacccgtgcgaaatgaagtcttgctcttgcgtccacgcttgtctgcattctcctcctgccggtccactgcggcttgcagtgcgtctcgcacgaaacgtgtgattgcttgacgctgctgcacaaactcggcaaccgccaagtgatccgtgggactcgccgaggacttcggtgcatagttggcggtagtagctggttgctgcatcgtcgctggagcgccagcggggtcgatcagagttcgctctgtccagtctgcgagcggcgtcaccgcacgatgcggtgcggcaagggccttcttcttttgggatcgtgtcactgcatttgcgcttgattcggtcactgggaagcgtggcgacgccggtgaattgaccggcgacggctccgccggcgtctcggtctgcggtgagtcttcagcggttgctcctcccccaccaagcgtagaggcacgagcctccgtgggttggcctacggcaagcatagcgggtacacgcgggtggcgcgcggagttcacgaagaatggagtcatgcccgtcgacgagtgctcggcgttgttcagagcgaactcagtcaggggcaggaaagcgctccagctcgggaacgacgtagcgtagctgcggagcacgtcttcgacgacgcggttgatgcgttgggtttgtccatccgtctccgggtgagccgcggtggacatcgccagcttcgttccaagcaacttgaacagctccgtccaaaacgcggacgtgaacctcggatcccgatccgagacgatggagtcgggcagaccatgaaggcggaagacggcgtcaacgaagtggctgcggactcttccgcagtaaccgtggcagccacggggacgagatgcaccatctttctgaacctgtcgacgaaaacgaggactcccgtgcgcctgttcgagtcgggtggaagaccgaagacgaagtccatcgagacggagcgccaggcttccgtggggaccggaaggggacgcagcggagcctgcgatgacggcaagtgcgcactcacttgcgcacccacttgtacaagtggggccaaaagaagtctcgcgccaccgccgcgaaggtcttttcgcgtcccaagtgacccccgatcggagcgtcgtggtactcatggatgatccgggcgcgaagctcttcgtcattcgtcaccaccactctcggggcatcgaatcgatcgatggtgtacgtcagcagggagccatcaagccgatatcgctcgacgtggctgcgggtcgagcgcgacagagccttcaatgtcgcctcgcttggagagcggaggtgggccaggatgctgccgtactgcgcgtcatgctcgtacgctgcggcgatctcgtcccgaagcggcatcttgggggcgacgctcgtcaggttcaaccccgacgtcacacacgtcgcacatgcgtcttcatcatcttcgtcagctgcctggcgctcgaggccttcacgtgggtcgtagtctggacgccgagacagcgcgtcggcgaggatattgttcttgccaggcttgtagtgcaccacgaagttgtactcggagaagaaagacagccagtgggccatgcgctgggacagatgcggggatttcaccgcggtccgcagcgatgcgtggtcggtgtagaccgcaaacgtctgcacttcgagcaggtagacccgaacttgaccaatgcgtagcgcatggcgaggagctccttgtcgtgcactgggtagttcctctccgccggcttgagctggcgggactggtagctgatcacccgctcacgaccctcgtcgtcgaactgcatcagggcacacccgatggcaaagtcgctcacgtcgcagccgacgtggaatggcttcgaatcgtccgcgagcatcaagacaggggcggatgacagactcctcttcaccgagccaaatgcggcttgatgctcttctcgccacgaccacgtggtgtccttcttcagcagcgacgaaagtggctggattaacttcgcgtagtccttggtgtacttgtgcaagtagttcgccatgcccagccactgacgaagctcagtgggactcgtgggggtcggccaagagaagattgactcaaccttctcagggtcggcgcggactccgtccttgctcacgtagcagcccaacaccgggatctccggtgcacacaacacgcacttcttcaagttggcgtagagcttgttctccctcatcacctggaagacttgccgcaggtgcttcaggtggacttcgacagcgctgaggtcaccttcggcgcgactgttcacgaagatatcgggcgcagcacatgggagaccatgcggttaaacgtggccggcgcgttcttcagaccttggggcatcaccagccactcccagagcatgccgctcggagtgcttaccgctgtgagaggtatgtcacactctcgcatgagtatctggtagaacccatcggtcagatcgatggcgctgtagatcacgcttcccgccatagagtccagcgccatgtccttgcgcgggattggcgtctgcgcgggtatggtggcatcgttcgacttgttgaacgcgtgaacgatgcgccacccgcccgttgccttcttgacgcaaaaggtcgggctggagtgtggcgagatgctttcccgcacgtgacctgcccggcggcggctctcgaagaagtcgttgatggccttcacttggtcacgtggaagtggccactgccgcgtcacgcagtacttcgtcccaggcgcgaggtcgatctcgtggcgcacgcctcggtccgccgggagctcagcggggatcttgtcggggaagatgcccgcgtactcgcgggcagtttcgtacacggggttaccggactcacgcagagcttcccaggactgcgccgcgaagcgctcctcgcgcgctgacttgggctcggcgtgcttggacctcgacggcgcatcctcgaccttgaccgcgtgtagcgtatccaccgggaccgcctcggtgatcagacacacttgctctatctcgcctgccttcaggtctcgcaggaggttcttccaggagagtcctgggagacgcgtgattgtgttggcatcgcgaggcggactcgcgacttcgatgacgcgcggtcgtcgtggagcgccctccacgtactcgagagcgcacaccgactccttcggtgggttctcagtcgctgacggttctcgacggggcttcaggcgatgtcgcttggacttcttctttcgcttcgagcgggtgctcgaagaagacgcatcgctctcgctcgacgatgattcacccacgatttaccctcctctaggtgtgagaggccacgctcgatcacaccggcggtatgcggctgcaccacgctctcagccgcaacatcgttgtgcgggagcgactcatgctcgaccgcctgctcaacttgtgacgggaatccacgctcgaccgccgtctcattgtgcgacgggaacccccgctcgactgtcgacatcgtgctcgacgggaactcatgctcgaccgtctcagtcgcatctgtccagcttctctcaaattacgggttagaagcgacatacttctccggcccgcttcaaaatggcactttcggtttaagagcagtatcttcaaaagctatatatcatctataagaactgagcacaccgttgaatagctctcgatagcgcgcacaggtgagtattttgcttattttcctagcagcagaatcaagagagcaagccctgctcttaggtggctctttttaatggtcaggtcttttatcgccgttcagtcaatttttagcgatattacaccggatgtttaggtcacgcagcaagagacgttagtaatcgccgagccaagacattagcagtagaacaaagcagggatactccaagttaaaataaactccaacgtaaggtttattgcggcagacccagtaaacaatgtgtacccatctgtcactttgaccaatccgagtggacctactaattaggtacagaattagggaaacgcaaagatggaattgaccgattaagcgtacagctgcatgtatccggccgtcaccgcatccgttgcgaccattatcgacatgagcatccgcccactgacagctacatgcttactcacacgaggcagtctaaagtcgttcctcacaccacttcgtagaatcgcctccatcaccttctgtagggtgacaaaacacttatccagtgtttgccaccggagctcgtcaaacgtttccgtcactgcggcgatgaggctgtttgtatcgtaggcagccttccgatactgtaacgcttgaattgaagcaaagtagcccaaatcaagaacgttaagctcaggtgatcgaggtggctggcagcgcatcttaatcttccagccctccactctccctgctacctccaactcgacgtcgttttcgaggacgtgcggtcccgcgttgtcttgctaggcgaacaccgtcgagccctggcgaactacatgcagatcatgaaagtattttgtcagttgaattcgtgagtactggtattaataagaaaatagatttacctgacaccttggctctgatagcgatcgagggaaaaactttttcaacaagaaattgtcgttaaagtgtgctttctgaaaactacaacagctcggagcggtgtgcgccgcgccacgtactgtgacgccgcgatttccacgggccccacggcggcgctcagcatggccaagcgcatgcatcgtgccgtcgagcatgccgagcaaataccccatataggtggtggaggccaacgggtcatgtgttcatcatgaatgccgatcaacgggttcttggctgcaacgcgcagcgcaagcgatcgttcattttgccgcctcctaagtagtggcaatagtggtagcaaacgcacacgcggttatgacaaacagcgggaccccttgagcgagacgcactccttgcggttcatcgaatgcttggtcatgaaatcgacgaggatcgcgtccgagggcacgcgcgtgtacgaggaagcgcatgtcccgctggttgatggggcagttggttctcagatcattgacagaagtggagaccgggtacgacttggcatcgtcggtggcgaaggccacggaaatgccattggcgcagtggaccgcggggctcgagatccctcggtggacctggctccctcagcggagacaacccagttgacggcgaagcgtattgagaccccgttggatcttgattctgacgagtcggtaaatatgctccaccatttcgtcgatggtcgagttctcctcttcatcattgacgaacttatctagatatcgagggcgttgttgtcgtgcaagatgcaaaaatgtgaactacaaggcaaccaccaataacagcgccatccactggctcggaatgactctttagctctctgcgaagggtttgacagcgtccttttaccgccccgaacgcatactctactgcgatccgcgtaccggaatgaacatatttgtagaagttgatatccgctgacacccgagcgtcatgcgcaaacggagttaacaggtactcgcgtagcatatatactccgtcgcctaagaaagggcgattatgtgagacgctcttcacgttgaggccaatccaacttccgctccatgacgtgcagtcattacaactcctaggtcaaatacaaaaaatcataaataacttgttgcaacccacaaccccttgcatgttgaacgcggtagtgcccttacggcagtaccattcccagaaatttgaaatttgtcgggcgcgatcgtcttacgagagtttcatcaacagcgccaacaccaccaccaaagccagcgaccctgtcaaagcttcaactacttctgcccactcgctacccgagctcgagaatcttacgaaccgtgcccgatcgtcgtagaggactctacaaatgccaaagtacgcgcgagatgcagtcgccacgctgacaccaaattgactcaccacatctgcttatgatccgcgtaagtcgagatagcgtcatgttagcgcaagtttcatgtcgagtcagtacttggttcggttagactcagggacatgcccatagaatactgaccattgctactgaagatagctgcataacttcttgaaacacgaacgtctcatccgaaacgatcgttggaaggattcatctgaagcgttgaagttctcttcgaagtagttgcccgtgacagtaagctcttgcgaattcttcttccatcgaccgatccaacagcagtaacaagggtagcaagaagcaacatcataataatgttgaactcatccatatcattgataacaccactcatgcttaattcacgcttctggatcgggctgttcgggctgtgtttgcgcggactgcttcgactcggactgctcatatacaggctgcgtctgcttgggcctgttgcggctcctgcttggacggcgtcggcttgggcgcgggcagcttcttgcttggacgtggtcggcttgggcggcttcaggggtgcggctggagttggcgtgcggaagttggtagagaccctataggttgtgaaatttaatatgctggctaaaatataagttttggcagtttgctgtgggagcatgctgccctcaaataaaacatatcctaagtgatacattcttggaatctggtaatcatatctggtattctgagagttcttgtggagtttggagtcaaataaaagcaagcgtatgtttgtagcgagcgcggaaccctgaaatgcagatcaacgtgggtgaatggattctgtttcttgaagtggattgaaatataggagatcttccctgcgaatctatacaaggcggggctcgactctggttcgcaacttgggaactgagtcccttctcagattccccattgcattcccagaataacgacacccaaactttgcgcccgcagactttcttcccacaaacgtctaccaaccgcttcggctcagggctccaaatccaagaacacttagttagtctgtgacatctctcagaatccaaagtttatccatcaactccgagaaggcatccggtatagcgaccgatcaagtccagatcaacactccgcagaaaatcgcagtccccgaagagtcgctaaggaaggattttgtgcatgttacctttaaccaaacagagttcattttgcttcgaaaggcacaagtgcttctttcacagcctggaaggccgctctccacgacaaaactcgaagtaacttaggtaaatgacccactgctccggcctggaagtattccatatctgtttatttggcggactgcaagccgtctttgctgtatatttggggtctattgtacctgtgtcgaactgaagaagttggtgacagggtacatcgtatcctctttccgagaagtggtgtccccaaaattaaacaagtgcctcggatttgggcctattttggccttagtctgagcctagagaaataagagagggtaaatcagaatttgtatgattgtataacatgtatagcgctatttgggttggattctagtgtaagctcggcgtagttgtctgatttacggggtcgatacgaacctcctggtgaaaagagccgctacccaggggtacacatcgtgcgcctgaccaacaacaacacacaccctgtgccagccgagacggatccaagctctaggagcctgttgtcggtcaaggagggcctataactgttttctgtgaagaaacacgatcgcttcaccacaaactactgtagaaccatactacataaagtagcaatacagcgaatatcttcaagccaatttaggttgctgtgacagcgagcctacactgcacgccgctggtttatatgagggcagtaccattgagttctgttctaacccagattgttcaaccctcacataaaactgcagatcaagtcttgtagcaaaaagaacattcggctgggcattgagcgcgacaggaccatggcaagcctgaagactctttaacagacgcacgggaacttctatatcttttctttagtgtcctgagacgtcaccaagcagcaatagcatggggtacgcatgtattatctagtcagaaaatggtatagaaaacctgcacaatcagatcgttgtttcatcatctatagacctacacgccgatttactgaccgcgtagattgccccaaatttatgaaccgaagccatgttgaaacacagtattttctcgagtttgctatgaaatcgtcacctctaaaaaacatgcgtgggtcgtatcgatagttatttgttcgttatctttaccagcacaattcatccaaactgttttcggcccagtgactgtgattgtttgtgccagaatattttctaaatttgctgcaacaatagaaatgggtagcatttgcgatacaaacatagaaagtacagtcagcacctgtttggtcagcattaaaacctggccttcaccaagctttgacatattttccttcccttacccaccatttttttttctgcttgtgcgactgccgtctccggtctgttctggctctggcgcattgaaaacttgttgcagagaaggaaaaccaacctccacgtttgggacgctgcgaacttatcaaccggcagagctaaactgagatagcaagctttagcataaatatgaaccatcatacccgtcacagggacccatttcttccgaaggaaggaagcccaacgcactacctgctcctcccattcgggggggggggggcagcatcgcggacacggctatgaacgcggtactgaactgcgaaccgcacccaatttcgagcttataactaataagatatctctgtctgtatttacttctccgaccgacaaacaccacaatgcctagagccgccggtcaagctgacattccccccgcaacccgcctgcgcgtcgtgctcttcctcgctgagcgtagcgttcgcgggacgctcctccgcggcgcaattcccgctgcaatgacagcgtttagtgtctgccacaacactgtgaagaagctctggcgcaatcgacacgatgtgaaggccttagccgctccgaggcgggtggtaactccgcgttggagacggctgacacccgaggaggtggaacagctggtacaagctgtaccgctgtgccaacggcaaacccagcgggcactcgcggcggcgagcggcatcctgaggacaactcgtcaacgctaccttgccgacggatcgcttcaccgcgctacgtcgcgcgtgaagccgtcaattactgctgcccacaagctgagacgtctgcagtgggcgttatcccacgtggacatgcctctaggtaccgtacaacagtgacgcgataattgtttgctttgctatcatttagttctagcttcaatcgatattattttggttcaccgataaattcaaatttattttgaattggcttgaatgttttcgaataatgtgtattataggtggctgcagttaccgcatgcatcacatgtacgacatggtgcatgtggatgaaaagtggttcgacctctacaaaggggctacaaaatactactaaacggttgcggagcagcttccctaccgttcgtgcccgaacaaaaggtacattggcaaagtcaagtttttggcagctgtagcgcgtccgcgctacagctgcttaatgttgatggtaagttgggcgtctggcctatcgtggaggtaagcgaggctctttgtacctcagttaatcggcctagaggtaccgccgtcacgaaaagtgtgacacgcctttgagaacgaccatcttcagtgagaggaaccaggccagcatcaagtggagcagtgagcactgctcactaagcaggtgcagttcgtggtggcatccttcacggcgacatgacggccacctgcagaatagagcgggtctcggccctatctagcggccataagctccatggtgacagccggctacgcagaaattggtgaagagtccgttggagaagaggtggagcattgtgtcaacaggtgctgtgtggataggacatgattcaacttgtaacgcagtgtcactatcaaaatttgggttatgagaccaaaacttgggaattgcccatattatagaacccgctgattagtggaaatgtactggtcaagtgtgacaatcatggtaccagataagggaatgtttcattcaagggaatgataggcagctggggcaactttttaaatgtatatcttgttgataacactacatgtattgtgaaacccgattagaatgtcttattggattgtaaattcgccgatttagtggcttactaagaccgacgacccccgatttgataaatccgacctcctaattagactggggttcctcgatttatactcaagattactacctaggacgacttgcagagtcaaagcatatgagtcggatttacattagctaatcgggcgattaagccagagccggccgatttgcttcctattcagacggaatgtccgatgtgcaaccggcattcgctccttgtaggctaaatcagccgccagacaacaatcgttgcagtcgctcttggtttacgagtcaaggctacaccactaacagcacagtagaaaaatctacacgctacgatacaggttgttgaggtatgaaggcgacgggtctaagcgtggttacgcccaagccatttttcggacataatcgaatttttcagatgttgtacgatacagcttgttatagacaccggacacttaatttcactatgttcccgttaaagtacgtggcgtttttctgaaaaacgcgacatgagacctctcagcaaatcctctagcatgttgtaggtacagcgtggctacgctaatcatgttttaaggcataccatgatatcgattttggcagggaggtgcagtgacctttttatcaagagactggccagaggagacagagacggctataagaggaggacacatcatcatatcaaaagacaaaacgcatgcttgctcacctaactggccaatggccttcctcgctaccagtcaaagtttccctactcatttggcgacatctccggaagcctcacctctacaactaggcgaagcgacgtcgcccccagcttactcctctctagcttcctgctcttcatcctcatcctccttttcttcagcgtcttcttcagaatcctgacgcttgcgcttcttacctccgccagtgccagcggcccgagcctggatgccgcgcccacaacgcgggtgcggacgtttgctcccgttttcccacttattgtgccaaattggaaagcacgtcatagagttccctgggtagtgtttccaggccttgttgcaccagtacaaactgcagaaagctagttagatagacataaccaacttatccgaaatgaactacgtaccgtgctgtgtccgacttgctgcatgctgcacagtagtacttggtagcgcggcgctctctaaccttgcgctttagaattgagcacaccttgcactgccgctgccgacgcttacgaacgccgttcacgatctgccagtctgggcattctaccggctcgtggtccttttgcaagggcgccataagttctgcatcttcgtcgtcgtcaccacttgctgacggctagagtagcaatgttagcgacaacatggaccccatacaacatgtatctgcacgctcagcgaatgcactggcatacatgtgccagagacaacatgtatctgcacgctcagcgaacgtactcgcatacaacatgtaccccatacaacatgtagacttacccgctccacgaaatcttatttcttgagctgcaataactgggcgtgtagctccagcaaaagttcggcatgcgaagctggcttgagatccatgcgcttggccgcctcccggaatacgatgtaggcgttcacgattgccacgtctaccagtcttaagaagatagacttgtagtacttcttgcacgacgtctgcccttgcagagaatagggctggagtcggagttgatcgtggatatccactccacccatccactggtggtaatcacgcaccatgggcagggaacagcatggcgtctacctcctgtgccccgtgtacgtcgctctacaatgttacaaaaagcacagttagcctcgactgtaaaacagataatttgataggtacttacgatatgtctccattgctctgcttgattcggttcctaagaactgaacgggcttccggtcccaccaaactaatcccgtcatcaatccacagttccgagccaccgccatccgcaccgctccatgctgcacgcgcttaggacgattgcggttcttttccacgatttcttgtggatatccgactttgtcccccatgatagttccaattgaatatacattgcgctgtagtagctgaagcgcgagctgaaccgacgtgtagaatctatccgtcaccaccaggtggtaaacatcgtctagcggcgctggtagaacggcctcaaggttgcgggtcactgcaactggcccggagttcgggtccgcagaacgctggctgtccggtacgttgcctagttccgccgcatgctgggcttttccacaatatacctcaaggctgtatgttgtataatccaacatcacatattacaatcaggtgttagatacaacatgttgacttaagcaaaaaaaaacacgacgcgggtccatatggacccgcgtcgtgttctccttaccgcatgcagtaagctgtgtctgcacagcacgtcaggaagagcttggtgccccacttgtgcgggttgttcttgaggtattggcgggtcgggttgtttcggttgcgggagggtatgacgccttcatcgaacgatacgaccggcggtgtagtatatcctcgcgggaaggtttcctgcagcgtcttgaccacggagcgcaccttccacgccctgtccgatgctgcttgagggtcggcgttgttcgtgaactgtaggttagccatgatatgctcgaatcgatggcgaggcatgtagtcgttgaacgttccgcgtgccacagctccaaccctttccgtagaccaatagtctcgaaaacagcggcgctgtgggttcagcatccgcgccagcagcaatcccaggacgtgtataatctcgtgagcttcaatgtcgtccttcttcgcctcgcgcatcatgaactcatcccttgaattcttgcccggcgtcttttgattggcatacattcggtcgacccgtgtggtcacgttctgcaggaagtaccgattcgattctgctgccacctttctccagaacttcttcggcatgaagaatagaaacaaatccagcggcgactctgccagctccaacacttcagaagtcggaccgtacgcctctgtgtataagcctgggtacctcgcatccggaggaaacttcgccggatctacatgacgccacagacaacatgatttcgtgagtacatgttgtatatgccaacatcagatgatcacgtaccaaactcccagccacttgatcgcatgtccgccatgttgtgctcatcctgggcaaacgcgctcatctcgtccttgcgcagctctatctagtcacgagcagggcgatcactactcgattccgctggtgtggtttcagcgtcggctgacagagtttcacccgcagcaactggcatgtcatcaatctcggacccgctggcgttcattgcatcatcccactcgctgctttcgtctgcagtgccatctctgtgccggtcgtcattggtacgctggaactcatcatcatcgtcatagaagccaacctccgtttcgatgtcttcgcagtctgagttgagcacctcatactcggccgcttgaggctgggatgattcggcggctctatcagtcgaatcgcgtgtcggactttgaagtgcggagacgctcctatagtataatcaaatcaaagcgtcagtcatcatgtagtatgtcacatatgttgtataccatgccatgcgatgttgtacctttctccacctgcgcatgttgtatcatccaccactccacttgttgtatgatcttcatgctgtaccagactacaagaaatacaacatcaacagttagtacatgttggatggtccaccagatagataagttgtaccgtggctgcggcgacgccgacgatggccgctgctcagacacaggcgtcgcgctgccgttcgatgaaggagaagtgtccacgtgattgtccttcttcgtcgtcgtcttcttcgtcgcttcatcaatcttcttccgtgcttgatccagctcagacgcgcctttcgcttcagctgctgccgacgcaatgcaacgcagctcggcagcagcgcgccgcgcctctttggtctctttcgcaagctccgcagccgttggctttcgcggcttcttcgcctgggccttgggcttctgcttcgccttcgccttcgccttgcccttcgccttcgtcgtctccggcgacaccacttcctcttcctctagctcctccagctcctcatcgtcgtcgtattcgtttgcctcttcatcctcgtagtcctcatcttcgtcgtcggcttcgtcctccgagacgaactccgcatgcaccgacttctgcttgcgtcgtggaagcgccttcttgccagaatctgcgtatgttttggcagccaccacacgccgctacttcgaggccaactgcttctcctctccatgtacgacgcgctcttgcccatcggcggcggtacatacggccgtggcgtgcgtgccggtggcgacgagcaatcgtcgccaaagtccgcgtcggtgtcgcggcgccctgccaggaaatccgcatgctccttctggagacgccgcctctcccccgcgctccgtccttccaagcgctgcaaaaagcgctggtgctcactgcgggtttctcgctggggcgcgcgctttggtcccattgtcacttctggggtcttgcgtctcagccggcgattcttcaaatgagcatcagccactgatttcggaagagagggagctgggacagctttttgctgtggcttctctgttccaaaccctctctgttccaaacccacctacccctgtgcattggggaggtcgccttgttatgcccaagatttgcttatacttgatttaagtatacttttgccgtttttagagccaatccctattaaaacatgttgtatgtctaaaatatacaacatgtgacatgttgtcagatacaacgtgtggtcgttggggggttaacgcctttacttatcctgctagcgatgttactagtccactaagaccatgtacatgctgtgtaagatcctgcacatttcgttgcaacacagcgtgatgaggtattcctgtaagtgtgctgtcctagcttccgggtggtgctaacagccgttataatcgacgcagggtgtcggagagccgacccattcgtaggaggcagccttgacttgagaaagtccgcgtgatagactattaatgtcaacacaaatcaccaattgctcctgatgatgttggtaaactcggaaaataactagactttgcgttctcgagaaatcttgcagatggccagtagacaccaaaaatgtgatgacggagaagaaatttcgtgttctattatcgatagtccagccaatgtgcgcccaccgtacatatcgtcacatcaacatggatgatatagctgttctgtactgtcccgagtcaccattctgcacaaatatggatgacggcagccgacggcccggcggtgatttggcaagataaaaatgatgacaacccctttctaaataaacgggttgccaggtttgcccgctcatcatccaccaagtctgcctctggatactcctgcaccaggagaaatgcaaatcgtttgcgagggtgtgagggtggttgttccgttatgatgctcctttggctcagttggtagagcgtcagtctcataatctgaaggtcgccagttcgagcctggcagggagcacttctttgcctcttttgccctcgaatcttatcgccttttgctgcccctgcacgcatgccacaggcagccgacattgtcgcacagatcctcagcgtcacggcgagcagagctggctgctcagccaccggaaattcacagcggaagcccacttccatcggctcctaccatcggttctctcgttggctcgggttcgagtcggggaggcgcgctccgatttcggccgccttggctcgactcaaacgtaagtgaatcagcaagctgagcgccgaaaccacgttgtgggcgtgtctgtggacttccggacacgcagaacatcttgtacacgacgacgtgagaggatcggtctggtgtcgagagctccgacccggagcgtgtagcgtgagtctgttcgggattcaaacacgcccgtagtactcagtagcatccgcagaagacatggtagtgtcgagaaagactcggcagccttcgttcgatgacggggagggatgacatcttttttgcgcggaggtgtgtggagaagacgggaggcctgtgagcggccgtccaaggctacgaggcagtccgtggcgtgggcggcgacgcggcgatgcggtggtagtgagcgtagggcgtgttttgcgcgcaggggagctgaaaatcgtttgcgagggtgtgagggtggttgttccgttatgatgctcctttggctcagttggtagagcgtcagtctcataatctgaaggtcgccagttcgagcctggcagggagcacttctttgcctcttttgccctcgaatcttatcgccttttgctacccctgcacgcatgccacaggcagccgacattgtcgcacagatcctcagcgtcacggcgagcagagctggaattcacagcggaagcccacttccatcggctcctaccatcggtttcacagcggaagcccacttccatcggctcctaccatcggttctctcgttggctcgggttcgagtcggggaggcgcgctccgatttcggccgccttggctcgactcaaacgtaagtgaatcagcaagctgagcgccgaaaccacgttgtgggcgtgtctgtggacttccggacacgcagaacatcttgtacacgacgacgtgagaggatcggtctggtgtcgagagctccgacccggagcgtgtagcgtgagtctgttcgggattcaaacacgcccgtagtactcagtagcatccgcagaagacatggtagtgtcgagaaagactcggcagccttcgttcgatgacggggagggatgacatcttttttgcgcggaggtgtgtggagaagacgggaggcctgtgagcggccgtccaaggctacgaggcagtccgtggcgtgggcggcgacgcggcgatgcggtggtagtgagcgtagggcgtgttttgcgcgcaggggagctgaaaatcgtttgcgagggtgtgagggtggttgttccgttatgatgctcctttggctcagttggtagagcgtcagtctcataatctgaaggtcgccagttcgagcctggcagggagcacttctttgcctcttttgccctcgaatcttatcgccttttgctgcccctgcacgcatgccacaggcagccgacattgtcgcacagatcctcagcgtcacggcgagcagagctggctgctcagccaccggaaattcacagcggaagcccacttccatcggctcctaccatcggttctctcgttggctcgggttcgagtcggggaggcgcgctccgatttcggccgccttggctcgactcaaacgtaagtgaatcagcaagctgagcgccgaaaccacgttgtgggcgtgtctgtggacttccggacacgcagaacatcttgtacacgacgacgtgagaggatcggtctggtgtcgagagctccgacccggagcgtgtagcgtgagtctgttcgggattcaaacacgcccgtagtactcagtagcatccgcagaagacatggtagtgtcgagaaagactcggcagccttcgttcgatgacggggagggatgacatcttttttgcgcggaggtgtgtggagaagacgggaggcctgtgagcggccgtccaaggctacgaggcagtccgtggcgtgggcggcgacgcggcgatgcggtggtagtgagcgtagggcgtgttttgcgcgcaggggagctgaaaatcgtttgcgagggtgtgagggtggttgttccgttatgatgctcctttggctcagttggtagagcgtcagtctcataatctgaaggtcgccagttcgagcctggcagggagcacttctttgcctcttttgccctcgaatcttatcgccttttgctgcccctgcacgcatgccacaggcagccgacattgtcgcacagatcctcagcgtcacggcgagcagagctggctgctcagccaccggaaattcacagcggaagcccacttccatcggctcctaccatcggttctctcgttggctcgggttcgagtcggggaggcgcgctccgatttcggccgccttggctcgactcaaacgtaagtgaatcagcaagctgagcgccgaaaccacgttgtgggcgtgtctgtggacttccggacacgcagaacatcttgtacacgacgacgtgagaggatcggtctggtgtcgagagctccgacccggagcgtgtagcgtgagtctgttcgggattcaaacacgcccgtagtactcagtagcatccgcagaagacatggtagtgtcgagaaagactcggcagccttcgttcgatgacggggagggatgacatcttttttgcgcggaggtgtgtggagaagacaggaggcctgtgagcggccgtccaaggctacgaggcagtccgtggcgtgggcggcgacgcggcgatgcggtggtagtgagcgtagggcgtgttttgcgcgcaggggagctgaaaatcgtttgcgagggtgtgagggtggttgttccgttatgatgctcctttggctcagttggtagagcgtcagtctcataatctgaaggtcgccagttcgagcctggcagggagcacttctttgcctcttttgccctcgaatcttatcgccttttgctgcccctgcacgcatgccacaggcagccgacattgtcgcacagatcctcagcgtcacggcgagcagagctggctgctcagccaccggaaattcacagcggaagcccacttccatcggctcctaccatcggttctctcgttggctcgggttcgagtcggggaggcgcgctccgatttcggccgccttggctcgactcaaacgtaagtgaatcagcaagctgagcgccgaaaccacgttgtgggcgtgtctgtggacttccggacacgcagaacatcttgtacacgacgacgtgagaggatcggtctggtgtcgagagctccgacccggagcgtgtagcgtgagtctgttcgggattcaaacacgcccgtagtactcagtagcatccgcagaagacatggtagtgtcgagaaagactcggcagccttcgttcgatgacggggagggatgacatcttttttgcgcggaggtgtgtggagaagacgggaggcctgtgagcggccgtccaaggctacgaggcagtccgtggcgtgggcggcgacgcggcgatgcggtggtagtgagcgtagggcgtgttttgcgcgcaggggagctgaaaatcgtttgcgagggtgtgagggtggttgttccgttatgatgctcctttggctcagttggtagagcgtcagtctcataatctgaaggtcgccagttcgagcctggcagggagcacttctttgcctcttttgccctcgaatcttatcgccttttgctgcccctgcacgcatgccacaggcagccgacattgtcgcacagatcctcagcgtcacggcgagcagagctggctgctcagccaccggaaattcacagcggaagcccacttccatcggctcctaccatcggttctctcgttggctcgggttcgagtcggggaggcgcgctccgatttcggccgccttggctcgactcaaacgtaagtgaatcagcaagctgagcgccgaaaccacgttgtgggtgtgtctgtggacttccggacacgcagaacatcttgtacacgacgacgtaagaggatcggtctggtgtcgagagctccgacccggagcgtgtagcgtgagtatgttccggatccaaacacgcccgtagtactcagtagcatccgcagaagacatggtagtgtcgagaaagactcggcagccttcgttcgatgacggggagggatgacatcttttttgcgcggaggtgtgtggagaagacaggaggcctgtgagcggccgtccaaggctacgaggcagtccgtggcgtgggcggcgacgcggcgatgcggtggtagtgagcgtagggcgtgttttgcgcgcaggggagctgaaaatcgtttgcgagggtgtgagggtggttgttccgttatgatgctcctttggctcagttggtagagcgtcagtctcataatctgaaggtcgccagttcgagcctggcagggagcacttctttgcctcttttgccctcgaatcttatcgccttttgctgcccctgcacgcatgccacaggcagccgacattgtcgcacagatcctcagcgtcacggcgagcagagctggctgctcagccaccggaaattcacagcggaagcccacttccatcggctcctaccatcggttctctcgttggctcgggttcgagtcggggaggcgcgctccgatttcggccgccttggctcgactcaaacgtaagtgaatcagcaagctgagcgccgaaaccacgttgtgggtgtgtctgtggacttccggacacgcagaacatcttgtacacgacgacgtgagaggatcggtctggtgtcgagagctccgacccggagcgtgtagcgtgagtatgttccggatccaaacacgcccgtagtactcagtagcatccgcagaagacatggtagtgtcgagaaagactcggcagccttcgttcgatgacggggagggatgacatcttttttgcgcggaggtgtgtggagaagacaggaggcctgtgagcggccgtccaaggctacgaggcagtccgtggcgtgggcggcgacgcggcgatgcggtggtagtgagcgtagggcgtgttttgcgcgcaggggagctgaaaatcgtttgcgagggtgtgagggtggttgttccgttatgatgctcctttggctcagttggtagagcgtcagtctcataatctgaaggtcgccagttcgagcctggcagggagcacttctttgcctcttttgccctcgaatcttatcgccttttgctgcccctgcacgcatgccacaggcagccgacattgtcgcacagatcctcagcgtcacggcgagcagagctggctgctcagccaccggaaattcacagcggaagcccacttccatcggctcctaccatcggttctctcgttggctcgggttcgagtcggggaggcgcgctccgatttcggccgccttggctcgactcaaacgtaagtgaatcagcaagctgagcgccgaaaccacgttgtgggcgtgtctgtggacttccggacacgcagaacatcttgtacacgacgacgtgagaggatcggtctggtgtcgagagctccgacccggagcgtgtagcgtgagtatgttccggatccaaacacgcccgtagtactcagtagcatccgcagaagacatggtagtgtcgagaaagactcggcagccttcgttcgatgacggggagggatgacatcttttttgcgcggaggtgtgtggagaagacaggaggcctgtgagcggccgtccaaggctacgaggcagtccgtggcgtgggcggcgacgcggcgatgcggtggtagtgagcgtagggcgtgttttgcgcgcaggggagctgaaaatcgtttgcgagggtgtgagggtggttgttccgttatgatgctcctttggctcagttggtagagcgtcagtctcataatctgaaggtcgccagttcgagcctggcagggagcacttctttgcctcttttgccctcgaatcttatcgccttttgctgcccctgcacgcatgccacaggcagccgacattgtcgcacagatcctcagcgtcacggcgagcagagctggctgctcagccaccggaaattcacagcggaagcccacttccatcggctcctaccatcggttctctcgttggctcgggttcgagtcggggaggcgcgctccgatttcggccgccttggctcgactcaaacgtaagtgaatcagcaagctgagcgccgaaaccacgttgtgggtgtgtctgtggacttccggacacgcagaacatcttgtacacgacgacgtgagaggatcggtctggtgtcgagagctccgacccggagcgtgtagcgtgagtatgttccggatccaaacacgcccgtagtactcagtagcatccgcagaagacatggtagtgtcgagaaagactcggcagccttcgttcgatgacggggagggatgacatcttttttgcgcggaggtgtgtggagaagacaggaggcctgtgagcggccgtccaaggctacgaggcagtccgtggcgtgggcggcgacgcggcgatgcggtggtagtgagcgtagggcgtgttttgcgcgcaggggagaagggcgataagattcgagggcaaaagaggcaaagaagtgctccctgccaggctcgaactggcgaccttcagattatgagactgacgctctaccaactgagccaaaggagcatcataacggaacaaccaccctcacaccctcgcaaacgattttcagctcccctgcgcgcaaaacacgccctacgctcactaccaccgcatcgccgcgtcgccgcccacgccacggactgcctcgtagccttggacggccgctcacaggcctcctgtcttctccacacacctccgcgcaaaaaagatgtcatccctccccgtcatcgaacgaaggctgccgagtctttctcgacactaccatgtcttctgcggatgctactgagtactacgggcgtgtttggatccggaacatactcacgctacacgctccgggtcggagctctcgacaccagaccgatcctctcacgtcgtcgtgtacaagatgttctgcgtgtccggaagtccacagacacacccacaacgtggtttcggcgctcagcttgctgattcacttacgtttgagtcgagccaaggcggccgaaatcggagcgcgcctccccgactcgaacccgagccaacgagagaaccgatggtaggagccgatggaagtgggcttccgctgtgaatttccggtggctgagcagccagctctgctcgccgtgacgctgaggatctgtgcgacaatgtcggctgcctgtggcatgcgtgcaggggcagcaaaaggcgataagattcgagggcaaaagaggcaaagaagtgctccctgccaggctcgaactggcgaccttcagattatgagactgacgctctaccaactgagccaaaggagcatcataacggaacaaccaccctcacaccctcgcaaacgattttcagctcccctgcgcgcaaaacacgccctacgctcactaccaccgcatcgccgcgtcgccgcccacgccacggactgcctcgtagccttggacggccgctcacaggcctcctgtcttctccacacacctccgcgcaaaaaagatgtcatccctccccgtcatcgaacgaaggctgccgagtctttctcgacactaccatgtcttctgcggatgctactgagtactacgggcgtgtttggatccggaacatactcacgctacacgctccgggtcggagctctcgacaccagaccgatcctctcacgtcgtcgtgtacaagatgttctgcgtgtccggaagtccacagacacacccacaacgtggtttcggcgctcagcttgctgattcacttacgtttgagtcgagccaaggcggccgaaatcggagcgcgcctccccgactcgaacccgagccaacgagagaaccgatggtaggagccgatggaagtgggcttccgctgtgaatttccggtggctgagcagccagctctgctcgccgtgacgctgaggatctgtgcgacaatgtcggctgcctgtggcatgcgtgcaggggcagcaaaaggcgataagattcgagggcaaaagaggcaaagaagtgctccctgccaggctcgaactggcgaccttcagattatgagactgacgctctaccaactgagccaaaggagcatcataacggaacaaccaccctcacaccctcgcaaacgattttcagctcccctgcgcgcaaaacacgccctacgctcactaccaccgcatcgccgcgtcgccgcccacgccacggactgcctcgtagccttggacggccgctcacaggcctcctgtcttctccacacacctccgcgcaaaaaagatgtcatccctccccgtcatcgaacgaaggctgccgggtctttctcgacactaccatgtcttctgcggatgctactgagtactacgggcgtgtttggatccggaacatactcacgctacacgctccgggtcggagctctcgacaccagaccgatcctctcacgtcgtcgtgtacaagatgttctgcgtgtccggaagtccacagacacgcccacaacgtggtttcggcgctcagcttgctgattcacttacgtttgagtcgagccaaggcggccgaaatcggagcgcgcctccccgactcgaacccgagccaacgagagaaccgatggtaggagccgatggaagtgggcttccgctgtgaatttccggtggctgagcagccagctctgctcgccgtgacgctgaggatctgtgcgacaatgtcggctgcctgtggcatgcgtgcaggggcagcaaaaggcgataagattcgagggcaaaagaggcaaagaagtgctccctgccaggctcgaactggcgaccttcagattatgagactgacgctctaccaactgagccaaaggagcatcataacggaacaaccaccctcacaccctcgcaaacgattttcagctcccctgcgcgcaaaacacgccctacgctcactaccaccgcatcgccgcgtcgccgcccacgccacggactgcctcgtagccttggacggccgctcacaggcctcctgtcttctccacacacctccgcgcaaaaaagatgtcatccctccccgtcatcgaacgaaggctgccgagtctttctcgacactaccatgtcttctgcggatgctactgagtactacgggcgtgtttggatccggaacatactcacgctacacgctccgggtcggagctctcgacaccagaccgatcctctcacgtcgtcgtgtacaagatgttctgcgtgtccggaagtccacagacacacccacaacgtggtttcggcgctcagcttgctgattcacttacgtttgagtcgagccaaggcggccgaaatcggagcgcgcctccccgactcgaacccgagccaacgagagaaccgatggtaggagccccgtgacgctgaggatctgtgcgacaatgtcggctgcctgtggcatgcgtgcaggggcagcaaaggcgataagattcgagggcaaaagaggcaaagaagtgctccctgccaggctcgaactggcgaccttcagattatgagactgacgctctaccaactgagccaaaggagcatcataacggaacaaccaccctcacaccctcgcaaacgattttcagctcccctgcgcgcaaaacacgccctacgctcactaccaccgcatcgccgcgtcgccgcccacgccacggactgcctcgtagccttggacggccgctcacaggcctcctgtcttctccacacacctccgcgcaaaaaagatgtcatccctccccgtcatcgaacgaaggctgccgagtctttctcgacactaccatgtcttctgcggatgctactgagtactacgggcgtgtttggatccggaacatactcacgctacacgctccgggtcggagctctcgacaccagaccgatcctctcacgtcgtcgtgtacaagatgttctgcgtgtccggaagtccacagacacacccacaacgtggtttcggcgctcagcttgctgattcacttacgtttgagtcgagccaaggcggccgaaatcggagcgcgcctccccgactcgaacccgagccaacgagagaaccgatggtaggagccgatggaagtgggcttccgctgtgaatttccggtggctgagcagccagctctgctcgccgtgacgctgaggatctgtgcgacaatgtcggctgcctgtggcatgcgtgcaggggcagcaaaaggcgataagattcgagggcaaaagaggcaaagaagtgctccctgccaggctcgaactggcgaccttcagattatgagactgacgctctaccaactgagccaaaggagcatcataacggaacaaccaccctcacaccctcgcaaacgattttcagctcccctgcgcgcaaaacacgccctacgctcactaccaccgcatcgccgcgtcgccgcccacgccacggactgcctcgtagccttggacggccgctcacaggcctcctgtcttctccacacacctccgcgcaaaaaagatgtcatccctccccgtcatcgaacgaaggctgccgagtctttctcgacactaccatgtcttctgcggatgctactgagtactacgggcgtgtttggatccggaacatactcacgctacacgctccgggtcggagctctcgacaccagaccgatcctcttacgtcgtcgtgtacaagatgttctgcgtgtccggaagtccacagacacacccacaacgtggtttcggcgctcagcttgctgattcacttacgtttgagtcgagccaaggcggccgaaatcggagcgcgcctccccgactcgaacccgagccaacgagagaaccgatggtaggagccgatggaagtgggcttccgctgtgaatttccggtggctgagcagccagctctgctcgccgtgacgctgaggatctgtgcgacaatgtcggctgcctgtggcatgcgtgcaggggcagcaaaaggcgataagattcgagggcaaaagaggcaaagaagtgctccctgccaggctcgaactggcgaccttcagattatgagactgacgctctaccaactgagccaaaggagcatcataacggaacaaccaccctcacaccctcgcaaacgattttcagctcccctgcgcgcaaaacacgccctacgctcactaccaccgcatcgccgcgtcgccgcccacgccacggactgcctcgtagccttggacggccgctcacaggcctcccgtcttctccacacacctccgcgcaaaaaagatgtcatccctccccgtcatcgaacgaaggctgccgagtctttctcgacactaccatgtcttctgcggatgctactgagtactacgggcgtgtttggatccggaacatactcacgctacacgctccgggtcggagctctcgacaccagaccgatcctctcacgtcgtcgtgtacaagatgttctgcgtgtccggaagtccacagacacgcccacaacgtggtttcggcgctcagcttgctgattcacttacgtttgagtcgagccaaggcggccgaaatcggagcgcgcctccccgactcgaacccgagccaacgagagaaccgatggtaggagccgatggaagtgggcttccgctgtgaatttccggtggctgagcagccagctctgctcgccgtgacgctgaggatctgtgcgacaatgtcggctgcctgtggcatgcgtgcaggggcagcaaaaggcgataagattcgagggcaaaagaggcaaagaagtgctccctgccaggctcgaactggcgaccttcagattatgagactgacgctctaccaactgagccaaaggagcatcataacggaacaaccaccctcacaccctcgcaaacgattttcagctcccctgcgcgcaaaacacgccctacgctcactaccaccgcatcgccgcgtcgccgcccacgccacggactgcctcgtagccttggacggccgctcacaggcctcctgtcttctccacacacctccgcgcaaaaaagatgtcatccctccccgtcatcgaacgaaggctgccgggtctttctcgacactaccatgtcttctgcggatgctactgagtactacgggcgtgtttggatccggaacatactcacgctacacgctccgggtcggagctctcgacaccagaccgatcctctcacgtcgtcgtgtacaagatgttctgcgtgtccgcaagaggttctgcgtgtccggaagtccacagacacgcccacaacgtggtttcggcgctcagcttgctgattcacttacgtttgagtcgagccaaggcggccgaaatcggagcgcgcctccccgactcgaacccgagccaacgagagaaccgatggtaggagccgatggaagtgggcttccgctgtgaatttccggtggctgagcagccagctctgctcgccgtgacgctgaggatctgtgcgacaatgtcggctgcctgtggcatgcgtgcaggggcagcaaaaggcgataagattcgagggcaaaagaggcaaagaagtgctccctgccaggctcgaactggcgaccttcagattatgagactgacgctctaccaactgagccaaaggagcatcataacggaacaaccaccctcacaccctcgcaaacgattttcagctcccctgcgcgcaaaacacgccctacgctcactaccaccgcatcgccgcgtcgccgcccacgccacggactgcctcgtagccttggacggccgctcacaggcctcctgtcttctccacacacctccgcgcaaaaaagatgtcatccctccccgtcatcgaacgaaggctgccgagtctttctcgacactaccatgtcttctgcggatgctactgagtactacgggcgtgtttggatccggaacatactcacgctacacgctccgggtcggagctctcgacaccagaccgatcctcttacgtcgtcgtgtacaagatgttctgcgtgtccggaagtccacagacacacccacaacgtggtttcggcgctcagcttgctgattcacttacgtttgagtcgagccaaggcggccgaaatcggagcgcgcctccccgactcgaacccgagccaacgagagaaccgatggtaggagccgatggaagtgggcttccgctgtgaatttccggtggctgagcagccagctctgctcgccgtgacgctgaggatctgtgcgacaatgtcggctgcctgtggcatgcgtgcaggggcagcaaaaggcgataagattcgagggcaaaagaggcaaagaagtgctccctgccaggctcgaactggcgaccttcagattatgagactgacgctctaccaactgagccaaaggagcatcataacggaacaaccaccctcacaccctcgcaaacgattttcagctcccctgcgcgcaaaacacgccctacgctcactaccaccgcatcgccgcgtcgccgcccacgccacggactgcctcgtagccttggacggccgctcacaggcctcctgtcttctccacacacctccgcgcaaaaaagatgtcatccctccccgtcatcgaacgaaggctgccgagtctttctcgacactaccatgtcttctgcggatgctactgagtactacgggcgtgtttggatccggaacatactcacgctacacgctccgggtcggagctctcgacaccagaccgatcctctcacgtcgtcgtgtacaagatgttctgcgtgtccggaaaacgtaagtgaatcagcaagctgagcgccgaaaccacgttgtgggtgtgtctgtggacttccggacacgcagaacatcttgtacacgacgacgtgagaggatcggtctggtgtcgagagctccgacccggagcgtgtagcgtgagtatgttccggatccaaacacgcccgtagtactcagtagcatccgcagaagacatggtagtgtcgagaaagactcggcagccttcgttcgatgacggggagggatgacatcttttttgcgcggaggtgtgtggagaagacaggaggcctgtgagcggccgtccaaggctacgaggcagtccgtggcgtgggcggcgacgcggcgatgcggtggtagtgagcgtagggcgtgttttgcgcgcaggggagctgaaaatcgtttgcgagggtgtgagggtggttgttccgttatgatgctcctttggctcagttggtagagcgtcagtctcataatctgaaggtcgccagttcgagcctggcagggagcacttctttgcctcttttgccctcgaatcttatcgccttttgctgcccctgcacgcatgccacaggcagccgacattgtcgcacagatcctcagcgtcacggcgagcagagctggctgctcagccaccggaaattcacagcggaagcccacttccatcggctcctaccatcggttctctcgttggctcgggttcgagtcggggaggcgcgctccgatttcggccgccttggctcgactcaaacgtaagtgaatcagcaagctgagcgccgaaaccacgttgtgggcgtgtctgtggacttccggacacgcaaaacatcttgtacacgacgacgtgagaggatcggtctggtgtcgagagctccgacccggagcgtgtagcgtgagtatgttccggatccaaacacgcccgtagtactcagtagcatccgcagaagacatggtagtgtcgagaaagacccggcagccttcgttcgatgacggggagggatgacatcttttttgcgcggaggtgtgtggagaagacaggaggcctgtgagcggccgtccaaggctacgaggcagtccgtggcgtgggcggcgacgcggcgatgcggtggtagtgagcgtagggcgtgttttgcgcgcaggggagctgaaaatcgtttgcgagggtgtgagggtggttgttccgttatgatgctcctttggctcagttggtagagcgtcagtctcataatctgaaggtcgccagttcgagcctggcagggagcacttctttgcctcttttgccctcgaatcttatcgccttttgctgcccctgcacgcatgccacaggcagccgacattgtcgcacagatcctcagcgtcacggcgagcagagctggctgctcagccaccggaaattcacagcggaagcccacttccatcggctcctaccatcggttctctcgttggctcgggttcgagtcggggaggcgcgctccgatttcggccgccttggctcgactcaaacgtaagtgaatcagcaagctgagcgccgaaaccacgttgtgggcgtgtctgtggacttccggacacgcagaacatcttgtacacgacgacgtgagaggatcggtctggtgtcgagagctccgacccggagcgtgtagcgtgagtatgttccggatccaaacacgcccgtagtactcagtagcatccgcagaagacatggtagtgtcgagaaagacccggcagccttcgttcgatgacggggagggatgacatcttttttgcgcggaggtgtgtggagaagacaggaggcctgtgagcggccgtccaaggctacgaggcagtccgtggcgtgggcggcgacgcggcgatgcggtggtagtgagcgtagggcgtgttttgcgcgcaggggagctgaaaatcgtttgcgagggtgtgagggtggttgttccgttatgatgctcctttggctcagttggtagagcgtcagtctcataatctgaaggtcgccagttcgagcctggcagggagcacttctttgcctcttttgccctcgaatcttatcgccttttgctgcccctgcacgcatgccacaggcagccgacattgtcgcacagatcctcagcgtcacggcgagcagagctggctgctcagccaccggaaattcacagcggaagcccacttccatcggctcctaccatcggttctctcgttggctcgggttcgagtcggggaggcgcgctccgatttcggccgccttggctcgactcaaacgtaagtgaatcagcaagctgagcgccgaaaccacgttgtgggcgtgtctgtggacttccggacacgcagaacatcttgtacacgacgacgtgagaggatcggtctggtgtcgagagctccgacccggagcgtgtagcgtgagtctgttccggatccaaacacgcccgtagtactcagtagcatccgcagaagacatggtagtgtcgagaaagacccggcagccttcgttcgatgacggggagggatgacatcttttttgcgcggaggtgtgtggagaagacaggaggcctgtgagcggccgtccaaggctacgaggcagtccgtggcgtgggcggcgacgcggcgatgcggtggtagtgagcgtagggcgtgttttgcgcgcaggggagctgaaaatcgtttgcgagggtgtgagggtggttgttccgttatgatgctcctttggctcagttggtagagcgtcagtctcataatctgaaggtcgccagttcgagcctggcagggagcacttctttgcctcttttgccctcgaatcttatcgccttttgctgcccctgcacgcatgccacaggcagccgacattgtcgcacagatcctcagcgtcacggcgagcagagctggctgctcagccaccggaaattcacagcggaagcccacttccatcggctcttaccatcggttctctcgttggctcgggttcgagtcggggaggcgcgctccgatttcggccgccttggctcgactcaaacgtaagtgaatcagcaagctgagcgccgaaaccacgttgtgggcgtgtctgtggacttccggacacgcagaacatcttgtacacgacgacgtgagaggatcggtcgccagttcgagcctggcagggagcacttctttgcctcttttgccctcgaatcttatcgcctttgctgcccctgcacgcatgccacaggcagccgacattgtcgcacagatcctcagcgtcacggcgagcagagctggctgctcagccaccggaaattcacagcggaagcccacttccatcggctcctaccatcggttctctcgttggctcgggttcgagtcggggaggcgcgctccgatttcggccgccttggctcgactcaaacgtaagtgaatcagcaagctgagcgccgaaaccacgttgtgggcgtgtctgtggacttccggacacgcagaacatcttgtacacgacgacgtgagaggatcggtctggtgtcgagagctccgacccggagcgtgtagcgtgagtatgttccggatccaaacacgcccgtagtactcagtagcatccgcagaagacatggtagtgtcgagaaagactcggcagccttcgttcgatgacggggagggatgacatcttttttgcgcggaggtgtgtggagaagacaggaggcctgtgagcggccgtccaaggctacgaggcagtccgtggcgtgggcggcgacgcggcgatgcggtggtagtgagcgtagggcgtgttttgcgcgcaggggagctgaaaatcgtttgcgagggtgtgagggtggttgttccgttatgatgctcctttggctcagttggtagagcgtcagtctcataatctgaaggtcgccagttcgagcctggcagggagcacttctttgcctcttttgccctcgaatcttatcgcctttgctgcccctgcacgcatgccacaggcagccgacattgtcgcacagatcctcagcgtcacggcgagcagagctggctgctcagccaccggaaattcacagcggaagcccacttccatcggctcctaccatcggttctctcgttggctcgggttcgagtcggggaggcgcgctccgatttcggccgccttggctcgactcaaacgtaagtgaatcagcaagctgagcgccgaaaccacgttgtgggcgtgtctgtggacttccggacacgcagaacatcttgtacacgacgacgtgagaggatcggtctggtgtcgagagctccgacccggagcgtgtagcgtgagtatgttccggatccaaacacgcccgtagtactcagtagcatccgcagaagacatggtagtgtcgagaaagactcggcagccttcgttcgatgacggggagggatgacatcttttttgcgcggaggtgtgtggagaagacaggaggcctgtgagcggccgtccaaggctacgaggcagtccgtggcgtgggcggcgacgcggcgatgcggtggtagtgagcgtagggcgtgttttgcgcgcaggggagctgaaaatcgtttgcgagggtgtgagggtggttgttccgttatgatgctcctttggctcagttggtagagcgtcagtctcataatctgaaggtcgccagttcgagcctggcagggagcacttctttgcctcttttgccctcgaatcttatcgccttttgctgcccctgcacgcatgccacaggcagccgacattgtcgcacagatcctcagcgtcacggcgagcagagctggctgctcagccaccggaaattcacagcggaagcccacttccatcggctcctaccatcggttctctcgttggctcgggttcgagtcggggaggcgcgctccgatttcggccgccttggctcgactcaaacgtaagtgaatcagcaagctgagcgccgaaaccacgttgtgggcgtgtctgtggacttccggacacgcagaacatcttgtacacgacgacgtgagaggatcggtctggtgtcgagagctccgacccggagcgtgtagcgtgagtctgttccggatccaaacacgcccgtagtactcagtagcatccgcagaagacatggtagtgtcgagaaagacccggcagccttcgttcgatgacggggagggatgacatcttttttgcgcggaggtgtgtggagaagacaggaggcctgtgagcggccgtccaaggctacgaggcagtccgtggcgtgggcggcgacgcggcgatgcggtggtagtgagcgtagggcgtgttttgcgcgcaggggagctgaaaatcgtttgcgagggtgtgagggtggttgttccgttatgatgctcctttggctcagttggtagagcgtcagtctcataatctgaaggtcgccagttcgagcctggcagggagcacttctttgcctcttttgccctcgaatcttatcgccttttgctgcccctgcacgcatgccacaggcagccgacattgtcgcacagatcctcagcgtcacggcgagcagagctggctgctcagccaccggaaattcacagcggaagcccacttccatcggctcctaccatcggttctctcgttggctcgggttcgagtcggggaggcgcgctccgatttcggccgccttggctcgactcaaacgtaagtgaatcagcaagctgagcgccgaaaccacgttgtgggcgtgtctgtggacttccggacacgcagaacatcttgtacacgacgacgtgagaggatcggtctggtgtcgagagctccgacccggagcgtgtagcgtgagtctgttccggatccaaacacgcccgtagtactcagtagcatccgcagaagacatggtagtgtcgagaaagacccggcagccttcgttcgatgacggggagggatgacatcttttttgcgcggaggtgtgtggagaagacaggaggcctgtgagcggccgtccaaggctacgaggcagtccgtggcgtgggcggcgacgcggcgatgcggtggtagtgagcgtagggcgtgttttgcgcgcaggggagctgaaaatcgtttgcgagggtgtgagggtggttgttccgttatgatgctcctttggctcagttggtagagcgtcagtctcataatctgaaggtcgccagttcgagcctggcagggagcacttctttgcctcttttgccctcgaatcttatcgcctttgctgcccctgcacgcatgccacaggcagccgacattgtcgcacagatcctcagcgtcacggcgagcagagctggctgctcagccaccggaaattcacagcggaagcccacttccatcggctcctaccatcggttctctcgttggctcgggttcgagtcggggaggcgcgctccgatttcggccgccttggctcgactcaaacgtaagtgaatcagcaagctgagcgccgaaaccacgttgtgggcgtgtctgtggacttccggacacgcagaacatcttgtacacgacgacgtgagaggatcggtctggtgtcgagagctccgacccggagcgtgtagcgtgagtctgttccggatccaaacacgcccgtagtactcagtagcatccgcagaagacatggtagtgtcgagaaagacccggcagccttcgttcgatgacggggagggatgacatcttttttgcgcggaggtgtgtggagaagacaggaggcctgtgagcggccgtccaaggctacgaggcagtccgtggcgtgggcggcgacgcggcgatgcggtggtagtgagcgtagggcgtgttttgcgcgcaggggagctgaaaatcgtttgcgagggtgtgagggtggttgttccgttatgatgctcctttggctcagttggtagagcgtcagtctcataatctgaaggtcgccagttcgagcctggcagggagcacttctttgcctcttttgccctcgaatcttatcgcctttgctgcccctgcacgcatgccacaggcagccgacattgtcgcacagatcctcagcgtcacggcgagcagagctggctgctcagccaccggaaattcacagcggaagcccacttccatcggctcttaccatcggttctctcggaatacataacttcgggggagtgatcaggtacccctgtaactccaagtagtctgtttttgaagccacgccattttagctccgaaacttggaatggctccagaaacttcagttctctattaaggtctggggattagtactgggataggaagcaacgttagtgctgctatcgcagaccaaataggattatatccgtggtacatcaagtcaaacgatgactcctcttgacatctaactggtacattttcttgaaaccggtacgtctccggtgccgcactgggccctccaagaggtttatatgcatgggcagatcgcaccggtacgatactcatcacactggtatgacgccggcgccacaagcgtgggcagatcgaaccggtgcactaccgacaacactggtatgaatcaatcagtatatgtctgggtacatatggacgaaatgagcatttggatttttctacaagctctaaacagatatcaaccaaggttcgcatttttaatattgtaaagcattgccggtagacagtttgaattggcaaatttccgggcagatgctgcggctgcgaagcaggcgcaggagatgaccgtagctaataagaaaaatataataaaaaataaaaagaaggggtttataccaaaattctcctatcccagccttcgcggagccctagtaccgtgggacagtcaaaaggggcagtttgacaggtaatacgctagaagtcgaagacggatgacggtaactcaacgttgagatgcagcagcggagttcagataaggaacagttcgacttaagagtgccttaactctcaattgctacagtctgttggagatgagtgcacatccgaccacgatttgaattggcttgctcatcagttatctagaaggttcaaaattaaacgtttaggtccatctaaattctagtttttagaagcctggactgcttagcaacttttcaaattccccccaaaaggagctcaacccatttctaacctctggcacatattcgcaaaccgtacgcatttgactaacaccaaatggcaggtggcgatacgcgcgggtcgcggcgctctgacggcttctcccgtcgccggcgccgcagccccagcgacgaggatacctccacacgctcgcaggatgcaggcgaccactctgacgtcgaaattatccacgacttccgctccaagcgcgagctggaagccgccgaagacgaggctaagctgacgcccgaggcgcgcgagcgactgcgcgaccgcgaggagcgcgacgccttcgccgagcgattacgtcagcgcgacgaggaccggaccaagcgcaaacgcaaggccgacgagctggaggcgtccgaaggcgcgggcggactcacgcgcgacgagatcaagcaactggccacgagggggacagttgacgctggacaggacgcgctcggggacaagctgagacgcctccgcgagctgagcaggcaggaatacctcaaaaagagggaggagaaggagctggaactgctggagttccagctgaaagacgaggacgtgctctttgagggcggcaagaggtccaggaaggaggaggagcagcttgagctcaaccggaggatcctggagacagccaaggccaggtccaagaaagaggagaccgagggctaccagatccctgactcctatgaggaggtggacgatgagggcaacaggatcaggaagaaggaggatttgctgacggacaggtatgaggaggaggaggtgttccacacggagcaggaggtgtgggaggagacgcaggtcaagatggctacgagcaggttcggagccaaggataaacgcaagaagaagacggaggaggaggatgaactggtctttgacgaccagatcgacttcatctcgcagcagatgctctcagggcatcatgtgagtgacgaggacgtcaaggaagcgagaaagaagatggaggaggccaagcacctgagcattcaagagggaaggaagcagctacctgtgtacccctatcgtgaatcgctgctggaagcgattcggaactatcctgtcattatcattgaaggagaaacgggatcgggcaaaacgacgcagattccacagtatctgcatgaggttgggtactcggagctgggcactattggctgtacgcagccaagacgtgtcgctgcgatgagtgtggctgcgcgtgtggcacaggaaatggatgtgaaactgggcaatgaagtgggatactcgattcgtttcgaggactgcactagcgacaagactgtgatcaagtacatgacggatggtatgttgctacgtgagtttttgaccgagccagacttgaagtcgtacagtgtcatgatcattgatgaggcgcacgaacggaccttgaacacggatattttgttcggcctcatcaaggatatcgcgcgtttccgtgatgatatcaagatcatcgtggctagtgcgacgctggatgcaactaagttcagcgcttacttcgacgatgccccgatttttaagatccccggacgcatgttccccgttgatattctgtacacgaaggctcctgaggctgactacctggatgcggccatcgtgacagtcctccagattcacattacccagcccctcggagacatcctcgtcttctttactggccaagaggaaatcgaagcagccgaagagatattactccagcgcacccgtggccttggttctcgaatacgcgagctgctcattcgaccgatttacgcaaccttgccttcggaacgccaggctcaggtgtttgagccaactccagagggagctcgcaaggtggtgctgagtacgaatattgcggagacatcgttgaccatcgcaggcatctgctatgtgattgatacaggcttctgcaagcagacgaactacaacgcgcaaaccggcatggagtctttgctggtggcgccagtgtcgcaggctatggcaaaccagcgtgctggtcgtgcaggtcgtacagcgcctggcaagtgcttccgtctgtacacagcgtggtcgtacaagaacgagctggacgagaacacagtgcccgaaattcagcgcacgaaccttgccagtgttgtgctgctcatgaagtcgctaggtatcaacgacctgcttcacttcgacttcatggaccctccacctgagaaggcactcattcgctcgttggagcaattgtacgctctcggagctctgaatggcctgggtgaactcacgaaacttggtcgtcgaatggctgagttcccgttggaccccatgatgtccaaggcactgcttgcttcggaaaagttcggctgcaccgaagaagtgatgacgatctgcgccatgctgagtgtcaacaactcgatcttctaccgacccaaggacaaggccgtccacgctgataacgcgcgcctgaacttcgctcggggcggtggcggtgaccacatcacgttgatgaatgtctacaaccagtgggtcgagacgaactactcgacgcagtggacctacgagaacttcgtgatcatgcgctcactaaagactgcgcgcgacgtccgagagcagctcgaaggcctctgcgatcgcgtggagctggagcgtacgagcaaccgcagcgaccacgagccgatccgcaaggccatctgcgccggctacttctacaacacggccaagctggacaactcgggccactacaagacggtcaagaaggcgcagtccgtgtacatccacccgagctcgtgcctcatcaagctggaagaagtcccgcgctgggtcgtgtaccacgagctggccttcacgacgaaggaatacatgcgcaacgtgatccccatcaagtccgagtggctgatggagctcgcgccgcattattataaaaacaaggaggtcgaggacgctcgcacgaagaagatgcccaaggcggttggccgggctggttaaaacaatgaatagatagggaacctctaaaggtttgaatgcttcgttaatggcaagtcgttgttgcagccttttggcttggcatgtacagtatgagacgcggtacccgattcgtggtacagagaagagcatttttttttgacaaaggcccaattcgcttcgcagtccgtcgagctccatcgccgcgtgtttcttcgagcgccatggtgcacagcagcaagtacgacctgctcatcaagctcctgctgatcggagacagcggtacgtggcgcggggctctccatctcttccttccgctgctcgcagacccctctaagcgtttagccgccctcctttatgcgtctccctgacttaggtgtggggaagagttgcgtgctgctgcggtactcggacgactcgttcacgacgtccttcatcaccacgatcgggtgcgtcacctgctgcaccctcttgctgatctgtgcatgcatggggggtaacgctagatgcttgtttccctctctacctctctcttggtgccgcagcatcgactttaaggtcaagacgatcgacgtggacggcaagcgaataaagctgcagatctgggacacggccggccaggagcgcttccggacgattacgaccggtgcgttctgctgccttcgaggctgttgtggttgtgttgctttgccggtaaaatggaggctaacggagatggcgacgtgtggtgctagcttactaccgtggcgcgatgggcattctgctcgtgtatgacgtgaccgacgaccactccttccagagtacgctcgctgccggagagtttgctgctttatgtatcggggctgcaggtctaacgtttgttctcgctgcttgctgccaatgcagacattcgcaactggatgacacaaatccgacagaacgcgtcgtcaaatgtgaacaagatcctgatcggcaacaagtgcgacgtggatccgtcggaaagagtgcgttggatacgtcagtaacagcgttatgactgggagggcgatcgatcgactcactgggggattgtgctgtgttgctactgtaggcggtgacaacgaagcagggccaggatctagcggacgagttcggcatcaagttcttcgaaacgagcgcaaagagcaacaagaacatcgatgaggccttccgctccatcgcagtggacatccagaagcgcctggccgagagcgagcacgatagattagacgtggcgaacggcagcaaattccgcgtggacgaggcccaggagcagtccaaagacagctgctgcgcctaaggacggcgccactacttaggttctttcgttctcgtttagtgccgcgtggttggcgcgcgctgcagtggtcgacgccagtcagcatcgatgcaggacgagcagccagcggatgcgatagtaaaacttatcaatactcacctcacctcacctacgcacttggccctttttgcctctctaaagtgtagccatctggcactgggccagtcatttttttccattggttggcatttgccaattgggaagcaggcggagatggcggagcgcgaggacatggtggacgtggacggcgagacgtgggacgactgggtggacgacggctcgtccgccagtttcgactgcgtgttctgcgccagcaagttcccggccgaggagccgctgcacgcgcatctgcaggaggcgcacgacttctcgctcaagcgcgagatctcggcgcgcaagctcgacacgtacggcaccatccagctcgtcaacttcctgcgctggagcacgctggacggcgtcgcggccgagcaggtgaagcagacgctggccacggagggcaacgccgccttccagaaggacgagttcctcaagcccgtggtggcggacgacccgctgctctactgtctcgactgcgacgacagcgacagcagcgatgatgaagacgcggctgatgaggaggagcagaagagcgagaaggcggtggtggcccccactgctgctgctgctggtgacgacgccgctgcgttgatcgccaagctgcagctcgagaaccaggagctcaagcagcagatgaccaagtactccaagctcgtccgcgacttcgtggtcgacggcgagagctcggcccccgtggaggacgccgcggacaacgacacgtactactttgactcgtactcgcacgtgggcatccaccgcgagatgatcacggaccggatccgcacggacggctaccgcaacgccatcctcaacaacccggagctgttcaagggcaaggtcgtgctcgacgttggctgcggcacgggcattctgagcatgttcgcggcgcaggctggtgctgccaaggtgatcggcatcgaccgcagcgagatgggcgacgtggcccgcgagatcgttgccgccaacggattcagcgacgtcatcaccatcctccgcggcaaggtggaggacatggatctgcttgtggacaaggtggatatcatcgtctccgagtggatgggctactgccttctgtacgagtccatgctggacacggtgctgttcgcgcgcgacaagtggctcgcccccggcggccacctcttcccggacaagtgctccatgttcattcaaggaatggaggactcgaccaagcgcttcgacttctgggacgacgtctacggcttcaacatgaagcccatccagtccaagatctcgatccgtgacgcgtttgtggaggacgttcggccgagcgacatcattacgagccgcgagctgctgcagaacatcgacatcgaccacgtcacgtacgacgagctcgacttccactcgaccttcacgctgtccgtcaccaaggacgccactttccacgggttcgtgtccagcttcgacatcggcttcgagcgcgattgcccgcgccccgagtacttcacaacgggagctgagggcacgcccacgcactggcaccaggtctttttccatgtcccgaagcccttcgcggtcaagaagggagatgctgtggagggcaagtggtgggtgcgacggaatgccgagaacccgcgcttccttgacgtcgagatccagtggaagcaggcggctgagggcgagttcctcgtccagcgttaccgcattcactaagagcttttagaggtagagcgccacaatgtacttgctttgaatttctttcagtttaagacactatttcttgtgccgcagctcatcggttgttggtggaagaaaccttgaaaactctatgaatgcagctttacctggctgatgacatccttcaccagcacggacattgctgataccttctcgaactcctcgccggtgggagcaatcaacgccaagcacttgagcagcaggtagtgagtagaagtaagcgatggcgtgaggtcgagtttctcgactagggggtccgccacgagaggtggctgagagtcactgatcacccacgcgaagacgtctgcaggcagcatactcatcaccacggcgtactctgcctccgtcttcattcgccgcagaataagggaaagccgagctcgagcgatcgctccaagcttcagtaccaagcgttccggtttctgcatcttctcaatcgccaagtctgcgcgctcgtcccggccggactggtacaagaagagcacgtactcttcacgaatcacctccaacggcagtccaaaggcctctgcaagcgcaaaccccagcgcttcgtcatgccggagaagctccttcaggaacctggtacgattccggttgatagagttcacctcttctttgctaggctcagtcggtgcttgggtcatcagaaagctgtccgagcggcacaaatatcgaccactattcgagaacagcttcacaattgagatcggtgtcactgccgtcgcggcgaaggaatcgagcagcataatcaaactgatgtgatctgcgatctgcgtcactgagaccatgtcaaacttgaagttccccagcgactgcatcagtgcagatgtatcatgtgaaggtggccatcgctgccggaatatcaaatggagatccttcacacggcaacgccacttgactgattgagtcaagctttccatcttgaatgcagtggtacgcgacacagtatcaacatcgtcttcgtcagagtcggcatccgcatcgcttgtttcatcgtcgtattcgctgtcagctccgtcctcgccgtacgcagttgctatggctcgcgatgcggacattgctttgactgctgacaacaaagtgacaagcagattccggattataccaaaaaaccggcgagccacttgaggctggagaccgcgttgcggcttcttgccagcagcgctttcctcccaaaacgtaatcagcgtgaccacgtgcacacgaatatatctttcccagatatgcgccgccattgccacttttattcgaagagactccacacaatcgagctccagcagcgcatcctccagctgacgcatgtccgaacgctctgcattccacgcggtgcacaggactccgacccggaagcagcacagagaatccttgttcgagaattggggataagcacgcaatactgctgggcaatccttcatctggacagccttccgacagttttccattgtcgcgacccagccgtctgtaccatcttcactcatgcttgcttcaacacggtccgtcggtagttgtactgcagcgtcatcttcaccagcctcgtggccatcgtttatttgcattaccgcaatacttcgaatgatgtcatcaacgtgctcaacagcgtcaacagacagacggccgactttcccaagacgcaatgacaaatgcacggttttagcgatggagtcctgcaaaatgacccagcgcgttccgctaccagcgctgctgtacttcccgaaggtatcttcttcagcatgtttagctgactgcttctctccccacccgcaatgctcactcaatacgaaggcatggaaaagcttcggcgtcttccagcatgagttgaagacttccaccagcgagcggggacaatcgcgcaagcggcgaagttggctctctgtcgaaacaaaaggcgtccctgcgttgtcttctacctcttgctctattgctgtctccacatctgcaataacgaaataaggctgcagccaccgctggagcgacgaagacagcgagggcgaaggcagtgcgaggatcgcactgagagggagtgagtaaaaccactcaataaatactcttgtcagaatatcttccgacaagaagatagccgaattcaattgttgcagctcctacaaaacaaaatcgaggtgttaaacaaatacaaatgaacttcacatgcacttcaccgtacctgaacagcgaagacactcgatagcactggcgcgaggataaacgtaaagaggcaatctctctgagcagcagtcgagaatttacgaaaaatgggagttttcaacacgcggaaagcctcacgcaaaaactcctccttcgtttccgcaacctcaaacagagataaaatatcgcggcgacgaggcaagtcaggatcactaaacggcatggagaagaactccatgaactcccacgccgtgagttgactggcgctttcaatcgctcgttgtgttcgagatcgtgattcatcgtccagcgcaataccagcccgacgaaacagctccagccacggaaggacgcgcggcaatggaccagtttgctgcttgttgccactgaaccgagagatggtatctttaacggaagtctgcaccatggttatcagagcgcgcttacctcgctcaaactcctgtaggtagtgaacaaagattagcatgaagcacgcagcctgcacattaatcaccatacgtacggtctgaaatccgataaaagttgatacgaggcggtgctgccagagcaacttccactgcagcgataactctgctccagtcggcgttctcgatgacattccgttctttaatgcctgggggaacacacgagttagaaaccgtaagacgggctgaatttcttttaggtagccacgagaaggttcttaccagctgcaacttttccaaagccttgagcaaaaagctcgcgttcaatactgccatgtctgcattaagtaaaacgtcgagtagcgcctggatcgtagtggatgaagaaaggctgccgatatcttctagcaacgggcccagtatgtcttgctcgagcgtatgagtcgcgtcgacacgtttcttcttcacaaatgcctgaaggccacctatcacctggtgcagaaggaagttctcttcttggagtttgttctgtgtgaaatacttgagcaaaatcgacgcattgggcagcccgggcttcagctcaatcagctccgagagagtctcactcgtcttcgacagaacaacgcactttgtcctgcgcatcgcggggtcgaactgtgtgaaaagcttcgcgctgttgccaactgcaaagctgaaaacccggggaccataccgggcacgccacacttcgacgatgccacgttgggctgaataaatgacgaggtaaagcccaggaggacggcgagcgccttccgagccctgcatccagccacactgcgcgttccgatagcccttccacatccgaatcacaatcatccgagaggtatcaaccagcagaatccggccaagcgtgtccgagacagccgcgagtctgcccgtcgggctcaacacgagaactctgcatcgccgtcggtcgtcctcgtaaatagatcgagtagtgccgacaggggcaggcacatgctcagccgcagcgtcgattgccccagcacctagctgcgtataaccggcatgtccatctgcttgctcctccgactcaccagcacctcgtccccacccccagctagtcgcaaagttccacacagctccagcagccctcgaagcaatggcagtcgcgatatgcgccaagtggatgatcgagttctggtcgttccccgcctggtagaacgcgaggaacggcgcctgccccgcgctcacgatcgtgtacaccccgagacgcgcgtgcgactggaagatcgtcggcctcacgggtccgcacggaaccgccgccactatttccttctggtctcgcagcgagtacttcctgaacttgctggcctgcccaggacctgcgtcaattaatacatccatccgtgcacaatatcagtcagcagacgcactccaccagcctctcccatccattgcgacgcacgcaccgaacacggccgagttgagcttgctcaggatctccgagatctggatgatggcgaccgtcgagtccgcgtagagcacccagaactcgccctccgtgtcgggctcgctggccagcaagacgctcgcgcggcgcggcgccaccatggtcgcggcgttgcggttgacgtccagcttgagcacggccgcgccgtgcagcttctgctcgaagaggagcttccccacgcggctgaagaggcgcacgacgcccgacgtgtagcccacggcgaagagctctcggtccagccacttgacgtccgccacgcgctcgtcctcgtccaggcggacgtcctgggcgcccaccaccacacacagggggacgccttgctgaccatcactcccgctctgctccacgtcctcctgcacgcccgcagtgtacacgcgccgctcgaagcccagcagcagcgtcaggtcctcggccacgtccacgcgcacgcgcgggtcgtcgaacagcgacactggcgcctcctccccctcagcatcagcatcttcagcatcgacggcgctggagcagcgcagcgcggagctgtccacgcgcagcgccagggccagcgcgtcctcgtcggccacggatgtcgccatcccttctcggcttccttcctttgagtgaagtttctcttctcgagggtaccaaaagagcggtacaactggatttgaacagcaaaaagtggcttcacctgcttcaacttcacttgccctggcagagtcgaacctaaagtcgaagatgcggatgactgccaagatcgcggaatggcatagaatctggtagcatcacccacccggacggacgtgtgcggcgtagcagcagtcagtcacctctccacttgacttcggaggagactcgtccgtccccccattctcgcagtcgtcgaacactagtcgaaaccatgacgtcgcctcggattgaggctctgacgctgcttggtgtggcgctgctctggcagttggcgcacgcggctaacgtcggtgacagcagcacactgggcaagtacgagcgactgcaacgtctcggcgtcttccggagactgggctcaattgacgagggcggtagcagcatcgctggtgacgacgacggtgcgagcgtgacgccagtccagcagcagcagcagaagcaggaacacatgaccatacagccagagaccaccgagagctcggacagcggcttccccagtacctccgtcatcgtggtcgcagtggggcttgtggtcctcacgggcctcgtcttcctcctcgtggtgctgcgtcgcggcaggagctgtctcgaccagaccgacagcgagccgcctacgtcacgcgcgccccccgacaactcgcgcttctgtatgaagcgcacgacgttcgccgtccccgatacgaaccgcgctggtctcggagacatcgactcaagcggctccgtggttcccgtgctgggggacgaccccagccaccggaaaatgcgcgagaactctcgactggagtcgggcaactcctgggctgaggccacgtcctacagcgtcgctcctctcagtagccgccacacaagaccggcgccgccgatgctaatctacgctccagtccgtcgacacggtctcaacgacagccaggcggcgagtgactacagctcacacacggacgactactccatcggcatgctcgagtcgcctgtgtctacggaatacagcttcggctcggagggcgacgacagattcccgtccactccctgggatgaagttgactcgtaccgaagtctggactgcacattcctgtccacgacgtcctcgaacgtctttggctcgaaccgtgatcggagtggcggcgcctggaagaaggtctacggccccaccgatgattccccgacgacggactcggacatgccacgcttgtcttccgggtttctcttcgtgcggcagatggactcgcacaacatgagacgtatgcgtcttgacacgtgtgcccatggagctcgaaacaataacctcatgcgattcgatgtcgaggtatgagaagatttggtgaaataattcaccaaaagcttgtcatttgctgaagaggggactcgaaggccaggtctctctacaatacttttatttatcgattcgctcactgctgaaaggaatacagcttcgctgacagcgctttgcactacctacgcccaccgggactcgcctgtatacgaattgtagtagtacgtctgacctgaagcctcgtcaaccagtgtcatccagcctccatagtcgcctgatgaagctgctggaacagcatacgcttggttgtacgactgggcgtacgcttgagcctctcgagcttctcgagctgcttcagccaccgcgtattctgtgacgtactgatactcgctcgactgcacaaactcgtcgtaagtttgagcactctcctcttccttggccatttgcttcttcttctgtgccttcttgaacgttgccatgtctgtccactggtgggttgccttgttccccttcgagtggattatcgtaaagcagcccaagcagtaggggtcttcacagacagagcaccaacgagttgcacgcattttctcgcactcgatgcagcggagtgatccgatagccttccacgtgtgcttttcgcgcttcgccgaatggtgaagcttctcgtagcaagcgtcacaaaagacgtcctcgcactgagcgcactgtcgtctagcgtcttcttcttcgcactccacgcacagtttgtcttcgtcctcatcgtcttcattttgttcttcctcgtggtctttagcatttgaatcggagttatctcccccgttgagcgttggtggcgccttttgagctgccaagatggcggcgatgtcatcttcagatggatcgataaccttgccatcttgaagcacaagcttgccgtctgctttgttgtatcccgtcgctggaggggcccacagcgcttcaccagtctaccagccatccacgtcaaaatataagcagcatcccccaaatgaagatccatgacaacgacccatgtacctcttggttgtagtaaaaccacttggccgagtcttcgctccagtattccacccacgtccgcgcctggagtacgaatctagctgctcgctcctgccgaagctgctcgacccggcgaatcgcttgtcgtttgcggaccattttctgaatcttggttgcagcctgagcgcgcatgcgatttctctcacgcagcgccatcagcttcaactctgtcgacaagcgagcactaatgccaagaaacacggtggaaggtagcgagttagtggactctcctaatacaacagcaattgagtagtactgacgtaccggtgccctcgatacactcgctggatgttgatagctgcagcgcgacgaatcgcttgccgctttcgctcctcctcgcgcaaactggcgagtttcttccgtgcgcgtctaccacgagccatggtttgaattttcgttgcggcaatgttgcgcgctcgatccagacgccgctggatgaatgatgctcgcccaagacgcccacggtaccgacgctggatcaacaccgctgccttagtcagacgttgattcctccgccgaattgcgacttcacgccgagtcttccgaccacggtacagcgcctgcacgcgactagcgacgagatgcatcttccgctcgtcccgtagttgcttgattcgcttccgtacgatgtaacctcgtgccaatgcttggattcgagtggccatggcttgacgacgttggtcgagtcgcttgagcctgaagaatttgcgtgcaagaccccctcggaacatacgctgcatcttgatagctgcagtcgtttgcttggcgattagcttctgcatcttcacgaggtaagcaaacatccgcccacggtaggcgcgccacgagcgctgaatgacctgaatcgcattcagctccagagctgagcgctccaaggccttctcgtgcacaatagccgaccaccactttgtccaggcttgccgcagcttgcgttgcgaccaattaaccaagaacaggtccagcttcttgctccccttgtagagtaggtaggcctgcagcttttcctgctgcttctcgtacgtgactgcgtgcttccatcgctccatggccacgccttggagattgtatagcagtcgacgaaatatgttctccaccttttcttgcccccaccgtttgaagtagagcgtcgtacgcagctcggaagcgggacagatcttctgagcccagcaaatgtcgtccttcaccagccgcgtgagattctgcacgctataaagcgccgactccaattccttacgaagtgccccaccatcctctgcagcgcgaatgcccttctttgagggaccaacgttcttccgtttgttcgggtgtgtttgctgctgacgcttcttactcttcttgccttgtgctaggcctggaagcttttgaccgtcaagaggagcttgctttggttggtagaacgttggaggtgtagagttgacactcttgccattgagctccgcttcgagagcttcgatctcctccactgacaacccgagcgtctcgcttgcttgcttccgatcgacgtcctctttaattgcttgcacctcttttgctgccatggtgctggctgtacttatcacattcacggacggcagtcgaaaaacaggtagaacgtattgctgtagctgctggcgttggccaggtagaatttgagcgtccagcccaacttcgaaaggggtttctcctgttgttgtcagcactgggagcatatctagccctgctcgaacattcgggtgcggcgttgaaggagcattgcccccgccaggtgttgcgtgggccttcttgtgtctcaagaacgacttggagcgctggttcggagacagcttcaaggtcttggagtgcatcgcacgctgcaaatcattcggtactgggggtctaccgccacccatcgctagctggaagcgcttctccagctcttccacattggggaccgctgcttcgtggacattgttgagcgtgcttgcgagcgtctctgggtgctgacgttggaggttggccactttgagccgccactcggcctgcagcttggagcgcgtgcgctcgagttcctccagaagccgcagctcatggttcgtcaggcggtgcaaggcgtctgtgtgcggggtcaagattcctcctgcctcgccgctttcgtcaccggcttgatcagatggcaacgagtttgaagcattagccaccgcagccggcttggccttcttgcctccggagagattcccaccaaacagcagcatgccagtcgtgagaagtgctcacagttggcgctagttccaactctccagtcgactcgcttcgtatatataggtggcggtatgtgtagtgtcgctcaaagcccgtgagctcatggatgaaccaaccaagaaaacgcctcaaaaacttgctaaattgaccacgtgaaaacccactaagcttcatgaagattttcctgcgctcctatcaatactacgcccgatccacgaggagctgtccccgcatgcccgcagccagcacctgcacctgcgcgcgtgcctttataaactagttgacactctctgcacactcgtccgtcgtcgtgaccggtctcttcttccacgctgatgatctcagaacttgaagtgcacgagcatgagcgtcgccgccatgctgaggaacacatgcgagagcgcgttgtggttgaacttgtccttgctgggagcccatacgaggccctggataaggccgcccacgagcttgacgccgtacacgagcagctcgttgctcgagtggctccactcccagttccacgtcatgaagcaggcgatggggccgaagaccatcaccgggatgaagcccgcgaagaggaacaccgtgtgcatgctgacgctggcccagacggccagcaccacgtagacgacggcggccagcacgatgatggagtaggcccaggcctcgggcaggtggcggctggcggccagcgacagcagcgcgaagttggtgaggatggagcaggccagcaccacgcgccagagcgcgtcgatcatgttgtccacggtggagcggctgaggctgaagccgaagatgcgcgccgtcttgaccaggtgcttctcctgcttgtgcgcgatgtcgcgcatggcctcgaaggccacgtggtgcagcaggccgccgagcgccgccgagatgcccagcgccatgaagtacatgaggtaccaggccaggtcgcccttgtccgtggcggcgaagagcccgatgtacacggcgaaggcgaagcactgcacggccagcaggtagtcggtgatgaagcaggccggctgcgcgtcccactcctcgcccgtggtggagcggtaggcccagagcgaccagttctcgagctccgccacggcctggcgacacgcctgcgccacggtggcggcggtggcggacgccgtgcgcttgcgctgcgtcaatgcctcctgctgctgcatctgcgtctgggtctgcacttccgcgctcatgtgggtggtcagtttcgacggctgcgtgcgacttatgtgtgctggaggtggcggatttgatactgaaaataggccaggaaacgggaggccccagactaaagggccttagaccaatcacagcgcggctaatagagacactgcgacactagcgtaggttcaaatcgcgttcgaggacgaattgagcttccgagcgtattccgttcgggatcgctccgaagcacagtgcgcttccttctcaatgaagacgccgcgtgtggtgtctatgagagtgtatggcaacgcgccggccgcattgccgcgaggctgcgagtttcggtggtcctccgcacttgagctcgcgtctgttttttgccagctaaaatagcaagttgaagccgataaatgaatctaaagatgccggacgatacagttgctgctgccaattgatggacaccagccaacgctcgacggatggatgcttttattgctccttacgggcggatctgctggtagctgtagaacttgcggcggcgctgcagtcgcgcgagctgcacgctgcacgcaaaagccacgaccgacaggacaacggccacgacgaacacggggccgaaacattccgtaccgaagcacttctcgacgccgtcgacggtgcgcgtggacgtcgagtgctgatacacgtacgacgccaatggactgaagaagagagggtaccctacgcagttggcgagactcaaaagcccgaagttcttgccaaagtgctgcagaccgaactcctcgcggatgatcactgggaacgtgccgaacatgaccccctccgagaagcctgccatggccacgggcagcagcaaccagctcggtggcaccgaaaggaatacaacctgcgtgatggcagtgaacagcgcggaagcgccggcgaagtacgcgcgcgggtatcgtgtcaataagagatcggagacggcgccggtcgcgaggcgacccaatgtgttcacgatggagaatagcgccaccatgaacggaacctgctccactggcccacccagcgactccacgataaaagatacgtttgacatgaccagcaagcctgcgccgatgacaatcatcaccgggatgaagagcatccagaaccgcacatccgtcagcagagccacgcccgtgatgtcgacgggtttttcgctggcggcgccgttcacctgcccatccgacgacgtgcttgtgctgccgagaccgaactcaacgcttccggatctccttttcttgatggtgctttcttcacacgcaagcgggcgagcaaagacacaccagccgaagacgcaggcagctaggaggtagttccccacgaagaggaagtagccgggtacgtcgctgctgtggaaaccctcgtggaacacaaacgcgaagaaggcgcctccacagctgtacgccgacgtgagcgctgccatgaccttgccgcggttttcgtccccaaaaagcgactcattaggcacgatggacgagaagacgcagaacgagctgagcagtccaaacagcagcatggcgctccccattcccagcggactcaggctctccggagcgaactgtagcgccgtgaacatggccaggtgaattaccagcattgcgctcccactcagcagcacgctcgtgtacggaccaagccggtcgaagatcacgcctgggaagtagctcatgtacgttcctagcatggtcatcgaggagatcgtggagatgcctccttgcgtgaagtgcagcagcgtcttgagctgcgcattccacgccgatagcgcgtacgtcgaccccacgccgagcatgagcagcaccccggcgagcaggctgcaggaccggcgaagcagcgttggcgacgccaccgtcgagcgcatgattgccactgaaccggagattttggtaggattggctacacctctgccacgcaaagatggtacatggctacattgtcaagtggcttgaaagtatcttcgagctgcatttacgttaagcggacgtagctctggcgtgccgcgaagcggagactcgcggccagcgacaccacgctcagcgccactaccaacaggaacacgggtcggaagcactcttcaccgatgcacttctggacgccatccacgcgctctgccgacatactgtacacgaaggagcctacgggactgtagaacaacgggaagccgagcgcgttggcgacgctgatgagaccaaaattcttcccgaagtggcgcgcaccgaaggtctctcgcgttaagaccgggaaggcagcgaacatgacgccgtcagcgatgcctgacagcgtgatggggacagctaggtacgcgcgcggaatgaccaggaacagcgtgtggatcgcgccaacgaggacggacgccatactgactaagtagatacgcgggcagtgatccagcacgctgtcggacacgataccggccacgacgcggccgcagcagttgccgacggaaaacaacgccaccatcgtagggatttgccccatcgggccgcccagcgactccacaataaaggcaatgttggccatgataaacagcgacgaccccaccaaaatgaagacagtggcgaaaagcagccagaagcgcgagtcagccaggatctcgcgaccggtaatatcgggctgcacagtgggaaccagcttgcagttctcatccaggtccgcactcgtcctcgccgtcctctccggtggcataaattcttcgagggcatgaatgggtggagcgaccgcaaccgcgtgtgccggatcctctctaccaggccgatacaacgtcacccatgccagcagaaacacggcaagcattaaacaccccatgaaccggaagtacagcggcacttgcccgtcgaagttgtgctcgtaaagctcggcgaacagtgctgcaccggcgctgaaggccgcgaactccagtgccatgatcttaccgcgatgttcaggcccgaagagatcttcgttgggccccagcgccgcgaacacgccgaagttggttgcctgaccgagcacagcaaaggcgacacccacgcccagcggcgtcaaggcctcggggaatgcctctagaccggtgtacagccccgtgtagatgcctgcaagcaagagtccgccgagcaagacgctgcggtgggcgccgatgcggtcgaagacgtagccaggactcacggagaagtaggcgccgaaggacgccatcgagcacacgagcgagatgcccgcctcggagaagcccagcagcgcgcggagctgcgcgttccagacggagatcgagtggttcgagcccacgctccccatgagcaggagcccggccagcacgctggcgaggcgccggcatcggtcccagtcgcaccacatcagcgccattacgggagactttggtacagtgagcctctcgtgtgtcaggcgatcgatgattggctcggctggcgctattctccgattagtcaaaaatgaccgttgaagcgggccgcagactctgcggctctgcggcagagctccttggtcacacctcaaaagtggcattgctggtcttcgttgtgaatcacaatgtgaaccgacgaatgtcagcttgcgcatacagtacaaaggtggcttctccacacattttggctcgttggtggacacgtcgcgtttgttaacctttcctaagcttacttgagttgactgttgagctgccagcaaagctcttccgaagagcttcacctttggagcccgcatccgcgaatacacatgactcatgataaagaagggctgaatgccgccgaactaaagttccgtttgatattggtattgccgtactggcccacctcgaactggagatctcaagtcctaaatcagccattgaaagtgtgcaactgagctcggaagcacgcggatcgcgctagctgcagcactctagactggagatattacacgtcaaggaacatttatggatggctagctcttcaacgccggacttacttagctaactagcacgtaagtaagatgccagtgcagttgaagtgggccgtactcacgaccgtctgttttcctgacgcgctcaggagttactcacggacctgcaacttaatgacctgccaatatgcataccctgaaaggcatagagatctctataaaagtttttagactgcatgcaccttctataattaaacctgacaggacaagacaatagagacagggcggaccatccatccagaaaccgtccaccggaataccccgcttaagtacatctcggtgcactacactttacggccctcgccccatgaagcttcgccttcttggatgttctcactaagaaccatttcgcacaccgttcgccgagctccagatctcatttattgagctggcgtccggcttcttctcgcgcggtctggggccacaagtcccctcgcgatcacgatttgcccgccattccattacttaatcgacacaagtgggaccaagtcggctcttaatttagaccaatgagcgtctgccaattagccccagccctgagtacggagtgtggcgtcgcgaccagatgggcaagaagccagcacagccagcaccaattggccgcccagcgcgcattgctccacctctcgtcggccgcgcactccatcctgcccgctacctcgtcgccatgaaggtccggcgcggcagctcctcgcggctgcggcaggtcgcgggcctcctgctcgcgacgaccgcgctggcctcggccaatacggcgccctcgctctacggtgggtctcgctctacctcaccctctacccgtctaactgatgcgcatcgcctgtgtggtctaataatgggtctggctgttgttgtgttggtgctcgtgcagactacaagtatgacggcaccacgacctactgctactggatggaccagggcatgcaggtgtccaacttcgacttcgcctacgtgctccaggagggcacgggctccgactgcccgctcaccgtctcgctcgagcaggccacgaccggcatcatcctggccggcagcgaggtcgagtacgccttcacggccacgcttaacctcaacgacaacgccttcaacctcacggagctgcagactaccgtgccagacccgaccacgggactccccatgcagatcggccacgccaacatccacacgtgctcgcgctccaccgtgtgcgacatcttccgcacaggctccaaccgcaagatcgcggaccaggagacgtccaacttcacgagcgcgggcacggccagcttccgccagaagatcacgtacagcagcgcaggcgagcgcaacgtgttcgcgcacattattctgccgcccaaggactatctcgaggagagctaccacttcatcacgttcatcacgaccaatgtggaggccagctccactagcgcggcggacgaagagagctcgggtctctctacgggtgcaacggtcggcctcgtcgttggcgcagtcgcgatcgtggtagccgtgatcatctcggtggtgttctaccgccgcaaacgccaccccggtgacggcaccgaccacttccgcaacagtggctttggcctgcctgcgtcgtacgctgcgaccaagtccaagtcgcacctggactggaatgccgagcccgacgcgcgggtagcgtcaaacggttctggctggaaggacaactactcggctggaaatcgctcccaggcctcccgtggacccggactcaacgccagcgctcttgcctttaataccgaccgtcatagccgccagaacaagacagtctcgtcgtcgggatcgctccactccagtcgtggacctggtgacgcgggtatgatgtacgccaactacgagacgcccatgcagcggtctggtaacaacttcaacgccgtggaccccttcaaccggtcgcagtcgatgtaccccgacgattccatgtacgacgatggcgagtcccggatcgtcgaagaggaccccaacctcgagtatggacgcacccctgacctcgagactttcggtatcggtggtattcagggcccttccttcgagagcgagacgtccatgggaacgtctttcgagtacaacacggacgactctcatttcgcccagccgaccttcaacccgctgctcagtggttacggtcgcgagtcggacatgtcgagcatggggggaaccgacgagtacaatatgtacgagcagcctcgcacgcgtggtaacacgctcgacgcaatgctttcgacggtgcctggcgaccagggaagcgaaagcggcggcgttcgtgacggctcggtatcctcgattggcacggtagacttcacgcaggacgagccctctgttcgatccgcgaagccgatcacgtttgagcctttggacgagaccttgactctgtcgggctacggacgagccaaggaggggaaccccgaccttgccaagtctaacgagctcaacaaaaccaactccagcgagaacacggagtttgtgctccacgacagcagcgtcgagttccctacctccaacgccaacgccgacttcgtcagcacgactggctcggccgacattgacggaaagaccgacgtcaccagctccgatttcggtgccactggcaccacggacatcatcagcagttctgattacgagacgagcagcaaggccgacagtcacagcgactacgacgcaggcagcttcagcagcggcttggagggctcgagtttcaactcggacctgaccggcagcagctacggcacgggtatgactggctcgagttacggcaccgacgagaccggcaagagcctaaacgctgacctggaagactcggcattagatgcgaccaagacgaaagctggcctcaacgatacgcagtcaacctacgagtttgacgacaagtccttccgtgcttccgactcgttcaccacatccaatgacgatccgacggctggcgagggccttcgcccgagacgcgtgtcttcagccgatggcgagagctacgagttctagacttttcccgtcctgggcaactaggtagactttgtactatcgtttgttgatgcgttcggttgcgtggtggaagccaggagggagtggaaggcacttgctgtctgccactgggataatgtggaacggcaagggcgcgaaggaacgcctgcagtgcttgtggcctcgcagttttgctggttcggtggtgacatcattcgagttgcagagagtcacgtggacattccgatgcggaatatggagacgacggcgtacttcattttgttctttcttcgcgagggttctcgggctcgtcaagcttggcacattgggcatggacaatgacctgtggtggaaggcttgggtgcatgcgagaggactcgaacactacgctagtcgtatttaaaacttttttgaaacacgaaacacatgaacctggaaccatgtccactcctaccgagaactatgtggaggatgcaaagcgttcatgaaccctgctgcgtcaacccggcactccaccccccactataaatactgagtttctttttgcgtcctgttgacgatcgcgtttgctgggatagtggtgacagcactcacaaccgtccaacacctgaattcaattatctcggagggcggacgacgcgatgagggcaaatgaagttggcgccagctttggggtgaaggagtcggaggttcaatacggggaagcgccaaccctcgcgtcgagaccaagtgtctccgcttcaggctcacgtggagcattcagttgtcggaggtggcgactgctgtcaggaaagccaaaagacggcgatgctgtcggcacaagagccgaaccaaacctggctgaagtcgcacttcgaacggtgcagcgtccatcgacagccgatgtcgattccaagaactgggcctcagcagcgacgccgtttgcaacaatactaccacgagacacggtcgttccaacaatttcacgcaagtccgtggctgctgcagtcttgacgtccgcttgtccaccggagaatacgaagaagtgggagcgtgaaatgaccatttgcgagcgaaagcacgtcaaggccatggggagaatggtcgcaaggatctatcgtggcaaaggcgttggagaggaccccgcagagccttccagaaggcgaaaaaatcgcgaaaagcaggcgctgaaggatcacatttacctgcccgtgttgtgccaagctagagctggtgggtctcgcgacttgtcacctccccgggcgtccaagtcagtacaaccattacctcaacgggaagtttcttctcaaggtactggagacgcagttgaattacccggtgcgttggcaggtatgaagcttttatcatcgcagctcgacgagcttcgtgcagagcttgacacaacgtcgacacgaacagaaaggttatggtattcccaagcacagcgtgcgaccaagacagcatacccccgccccagccagacatctcgtatccaaatctgtagaatcgggcaacccgagtcgggtagcagctctagcagtctcgagacgcttttattgcgcgtactagagcgacctccagcctgtccggatgggtatcaggcggaccacgaagagagcacgttagactcatgcgacggagccaaaacaaagtccctggacagcagaagtaccaataccagtgaagacgatttgctgcttctgctcaacgcacttgactcaaccagtcaaacatcatcaacaaacagtatagcaagttcagacttcaccgtcaccagcgaggattgaaagggatttgttgatagcgatcggagtcgtgtatacgctgaagagccacccaaatttacatgacaagtcgaacagggagtcgccatggagcgcgatgaatcaatcccggttctgtcgaccaagcggccgaacaatgaacagctcagctctgccacggctctcgcaggtaccatgtcgaagaaccgcaagcagaagccggcgagtgcctatcagtattaccagaaactagttcaggattttgattcacttgagcgggaaatggagagtcaccaagaggaacaaagcgagctggaggcacaactagagcgtgcccaggctaaagcccgagcgttgcaagctgaggaccagcaattccagcgagttcaatgggagcgggagcgtgatcggcagctggaaatgtttgttcagcagcgcgccacactcgacactctacgttcccaaacggaggccttagaagcacaagagctacgtcttcaagctgagatggaggtacttcacgagaaacaacaagaaaccagcgagactgaagctcgctgcatccgccgccttgttcatgaacggacaacactactcgaagacgagctggctaaagggaagctggatctggactatatcacccaagttgtcacctctgcacgccgccaagagctcaagcaggaggctcagcgagaaacggatcacaacgccatgtcctccgttaagaacctcgtgcagaatgttcaggaccgcagacggcgcgacttcgaagtggcagaagctaatttccaagcccgaatgcgctcgttccaactggagaaggaggctttagctaagaaagccaaggaactgcgggtgaccaagcagcgagcgatccagattttatcgcaaaatcaacaacaagtgattaaaggatttttcgatgcacctgcagtgattcatcagcgcgaagagaaagcgcgggcagcaccaactctagattttggcgagatcttgcagtctctcaatcagagcggcgcgcaagtggaacagatccaaaccattgactccgaaaggaactcgggtcgtcgtgagcttgcagacgctttacaggacgcacgcatgacgctggaacaggggagccaacgcgttgaagcaatcaagaagagcttgttagaccggaagaacgaagctcaaaagctgggtatcgcagtacgggccaacacaagcgggtacgatggtatgtggggcgttgagtcgtacgctcctcggcagtacgaaatggtttactttatacgcggactcgtgtttgcgtgtatggatgctgctataactgaagtcactactcaacccgcgaaagagcttcttgaatttgaggtaaggcgttggagtgatacacacttcagtgtcgaacgggatcgtgatcgcgaaagaattgtgcgattcgcaagagaagcgcttgataatttgatggacgaggtggtcactgagattgctgcggacattcgcctggagtttgaatctagttctcattgtgttcggagtgttgtcacgaacgcactgaaggccgttttgtttccgactcctgcacacaaccttgcctcaccacaagccaagaaagcgatcgctaaatctcaagccacggttcctgcttcaactagaccacccacactacgatcatcgttgtttggatcctcattcgaacatcttcgggacctccgaaattggcggaaggggtcaaactcgaccatggtcctgcatcaaacctctctaccgatttcacagcaacctccagcaacggtagtaactccatccccagtggcgacgaagagccctgcgaagaaaacatttggcattttcagctcatcaaaaggagctgaggctactttatcgaaagaaggagtcccccctcggacccaaagcttcacccccgcatctatagaagttatcccgtttctttcagttgatggtcctaaatccccactatcgtctgctaccgttgccatggatttttgggaaaacaagccgctcgtacattcgcgaacaattatggtaccgtcgtcgttgggctattcaacgtgcttgcacgtatccggaaaaggtgatctgctcatctgcggtacaaccgaaggtgggctaataatctgggatctgctgcctgatcccccaacgatactgcgtatctggtcgcctccaaaggccgaacgctcgcgaattactcgagttgtactcagtgctgattctcaagtgatgctggcattcttccggcgtcgagccggctgtgtttttgctatcaacccgtcggttcgggtcagcaactcggctccaccagcaaaatccatgcaagccatgcactctgaaaattgtttccctgctgaagctacaaagttcaagccaattactctagaacttttagtgcagctttcggcgaccgatgctcttgctgaactgccatttccctctgatctacgcgagcgtgctccaaatgcagttgcgaaggaccccgccactggctggccagccgcagaattgagttgtgggtctttttttgcctcggcttcactaactgggatcacagcgtgcagtaccagcatactatgcggagcttccacgggagacttgttgaaatttaacttgcaaccgcaacgagtaacaacgggattacgattgcgcgccattcaagcgaaatttgactcaccaggcccggacgccgatgaggctctcgatacgaagaccattcggcgggagcttttccgggggcaccgacgagttatactttttgcgtcttccattagtcgaaaggacgaggaatcgaaagcactcgagattctgagtgtggaccaggatggcatattgtgcgtgtggaagtacaccgctaaagaatttaccggatttgggtggttcaagcccactttgaagctgcgattgaaactttcaggttcggaaaccaccccttccgttcctacatcgtcagcacctagtgcttcaaaacagcctccatctaagcaaggggattcgcaaggcgaggtgctgcaagttggcttgacgccagacgatgcccgacttgtgttcatggtattctacggcgattcaacgaagaaagaagtcacaggaacgcttcgcttttcacaacttctcactgcatccttgaaactggatccagtacaattcgaggtgggcttcactgcgggcgacggagcgcctcgattcgcagttaccacaaactttctgttcttgttggctaataactgcgtgcgcgtatataccctgcgcacaggcaaggaggcacgcgagcctattgcactctctgcttctgctaagcagcaggctgccttcagcgctatcagttgtagcagttcaaggcccagcttgtccgacaaacttggatctcaaaccaaatcagcaagtagacgaagcgcaggttctactacgatcactgtggctgtgtctagtgaccagcaccctcgtctccttgtatactcgttcactactccacaaaattatgagatgaaacttaaattcaaacgtgaacgatgagccaacactttgctttattgtgttccactcacggagaccacgcactcaactggtacttgtctaggagctccggcgtctgcgcatattttgtctgaaagggactgcccgtaagcagtcgaacgcagtcatctacatctagtggagtggcgtcaccgcttaagtcgttgaacagaaagaaggtcgtgttggccggcaacgataagcgcaggccacgtgaaaaaacttgcccaagcttgctcttcacactcttcagtgcttctggtgactccgttatcacgttgactgcgaggataccgtgtggggcaagtaggcgctttgccatttgcaagaaggccgactccagcatcgcaagcgggggtgctcgcaccccaccgcagctcgctccagcctcaacatccagcagtaccatgtcgagcagaccatccctctcttgcttcgcgagaaaatcttcacccatttcttcgtgaatcacaagtctcgggtcacgttgctgggctgccccaacgccgaagaagcgtcttgcaatcgcgtttacctgactacttggctcgacggcatcgatctggccaagcccgttcgatggataatgctccagaagaaacagaggcaacgcacatgctcctgcacccaatacggacactcgcaacggtagatcgcgctggggcaaccacgcaaggggcatgcacagagctctgtggacatcaagagccaacgtgctgcgatcgaattctggctcggcgtcggagtttttttcaggcatcttggtaagagcgacttcgctctgtgtcaagtgcaagcgatcattgaacacaaagctccgcgtgggcttcgatgtaccttcaaaggaactatccagaacagtaacctcatcatcactgaagacaatccgcctcgaaaacttttcgaagaactcagccttgtactgcgcgacaaactccggctcaacctcctcccgcaagtcacacagcatttgctgcagttcgtcgtaggtgtagttctcgcctgatcggtgaatctagcatccaatccacaacagttatcagctccatatcttcccaccacgattttccaatagtgcaaacctacatcgtgcagaatcgtctccggtatgacgtcgtcaaaggaataggctgggattgtctcgccctcttccttttccttcccttcctccgaaatgtggatgccttcacagtctgctgccgcaagctgccagtcatagtcggacacgagatgctgcggccaccacggaaacgttcgacactgcgtcggcctcgctgcatcaaacgcccacaaatcacagacgagggcgagcattagtgtcaagtttggctgtcatttgagggggaatataaatgagaccttggtagacagaacacttggaccctcgtaagaaaatacactggcgatcgtcaggggtttgcttgagcaccaaatgtgtctccttttgtccaccaatgtcctcctcgactcgacgcgtgtagcttcgcttgaactcgaccacagacaaatctgtggctgcggccagctcctgcagctcgcgctcgttcacgcgcacgcggccgccactgcctgtgcagcacttgccacagcccgtgcagcggaaactgagccgcacttcctcacgactcgctgaccagctctgcagaccacgcgcacgcagcgtcggcggcgccaacttgggccatcggtgcatattttgttttcaaaatgtttggtttccgatgctcaattttttgttagcagccaaatttaggtgatgcaatgttaaaattcggtttattatttatgacaataggaaagagtctgtactgtactacacctttgccacctcaaaccgaccaaagttcaacacaaagtgaacagcactgaaattttctattttcatttcaaaaatagaattagaaatagaaactcaaaactttgactttgaatgctgtacacaccaaagtggtcaagttccgtacaccatcggctcaccgcgcttcgcagcggcgactgcccgggcgcagtgaagcgccatcttgttcacaaggcgtaggtccatgcagttcatgcaaacctccgcagcttgctccagcagctgcatgcgcagctcggtcgtggtcagggtgcactgagcatgtcgtcgtgactaagcgcgaggtagcgcttgatcgcagctttcagcacgctgaagcagcctgtaatagaatcgcacaagccaagcgtttgtatgagcccatagagtagcaatagaaggggaaaacgcaccttcaatcgggttgcacataggagcgtacggcgcaagtcggaggagcccaaggtcgtcaagctcgcgcaccagctcctcggtctggctgtgggccggggcattgtcaagtacaatgacaaccggcttgccagcaaagtgctgctggtaggtggggtgcgccttggcagcgtcatagacagcgtcgacgaacgcagcgttctcctccatcttgatgctcccgcactgggtctcgtagtgcagcagaccgacctcggtagagaccgcgcactgtatttgcaggttcttgcccttgctgggcggcagcttcacgatggcgcgcttgcccttgagcgcacggccctgcgtgcgtctgcagtataggttgtagtttgtttcatcgtagtacacaatgaacgcaccttcagcactgtacctatgcaagtcaagggcgaactgcttgtgcttctgaacattgacttcattattgcaagttgcaggctcgactcgcacctacattcgtatcatagtgttatatcgatacataggttccgtaatgctagcataccaacaacaccatcgacatacctgcttgactgtgtacagttggcccgtgagcttctgcctgatcaaggacgtgctcaaatccacgccaaaatcgacccacaccatcgtattcagctgctccagtgtgagcaagcagttggcctctacgtagtcgaccagcgctgcctcaatctctggagtgcacttgatattggcggctcgagagccaccgcgctgcttcacctccggactcccgctcacgacgatgcggcgagcagtactccgggggatgccattgtgcttggcgacaagctcccagtcttctccctgctggtgagcgtctaagacgcgcgcgcgagccgcgaggctgtgcttcggctccttaggcatgagccagtcgaggtgaagtgcaaagagacagctctctgagtgctggtgggcgcgaattctactctccagtcgttctgaattgctggtgggcgcgcgcgggtctcctcatccagtcgtagtccgtttgaactttaaaaattccactttgacgtgaaacctaaaaataaaaaatgacatttgaatttccatcgttatattttgccaaattgaattgcactaagaccaccttgaagtggcaaatgtgtagtcgttgtctgtactacgacaacgactagggctcagcgcaccgctacgcaggcgcttcgccatggttattagggacttagacaatggtagggcgcccccgttccgctcgcggagctcgctgcactactcgcagcgtggggccgagtaattgatacagtccggccctgcgggccctgaagttcgtactcatgagataaaacgtatttttgtccaatgaaaattttgtggattgtgggcgtgacgaacagggaaactgctataagaaagggtgaatatccacgaggaacgcgacattgtcagctgagatttgtccgggtgggtttgataagatccgcgggtgggtgggtttaggttttgtttttttaggacccgatgacgtcatggctcgttgctgggaacggggccaggtgagaccgtcctcgatactgtttccttaatgaaatcctgtcaaatactctaaaccgtggtttgccgtggctcgctccccacttatcgcgcaaattggcaggctaacactccctctaaccctatgcaatagcgtgtttagtcctagagacagagataacaggcaaacggttgagttcataggctcagttttcaacttgaacactttccatcaccataagccgcggaaggatccggtctggaatgacgtagtcgtggcggacgatgtcgtctcgtgtaagaagtgcgagcgtatcatccacctgctgggagagacgcatgtcgaacgcgtccgcgaccacttcaagcgcaagggctccaagcgacctgtaacgaagccgattacagcttgccttccaccggccctaagccctgcgaagctgacggctttccaacgacagtttgcgctgtggttctattccacgggtatgacattcaacaaggtcaatcacgcaacgctggtgaaggcgatggctatccttaaccctggcgccgtcctccccaccccccgcgagcttgcgaccactttgctgtgcggatcgtgcggcgagttgaagctggtcatggtgcaccgtgtggcaggaaagaagtgcgacaagagcgttgtcgactacatgttgatatgcgaggacgaaacctacttcctgggctccgttgaaggagtggctgggcttggttgcgctccgggtcgaattcctgagcttctggctgacctcttcttctggctgcacgacacgctgcgggtcgtgttggcgttctaagcgtctttcgcgccgatgctggttgcgtaggccccgccgtatggccgcaaccaggcccggaaactggcgggcgaagcagatgggggtccctatgtgacgtctgagggatgcggcatgtcgaaaggggatcaggcaccgggggcaggtgaacaccatttaggaaatgaagtatgtaggctgtctggaaggtgtgccgagatcagtcctcgatttttaggagcccttaaatagtcctctgtgctcattctatttaaaaacccgcaattttgatgaaacgggcgggcgggtgttttgcaaaaccccaaaaaaccttcatcccaattttcgaaccctggatattgtgcgtcgcatctgcaggaagtcggcgtggaggaagtgatcctgcaaacgcggcaccgcttaggtgtaacggcagcagagggcgaagcttctaagctttactgaccataggcgcacctgcactattgccccgcactggtctgacatgatgagcgtcctgcaattattatatataagatttaaactggtctgacataatgaacgtcctacaattactacactgcaggacgctcatatgtcagaccagttcaagtcttacgtcaaggaagtcttgtccggtcaccgcaaaagccacgtgtacactcttgaaatcgacagcatgttgaagggcatgcggtgcatgcgccaatgggttagacactagaagagctttgtcgaccctaccaaatgtgcgtgcaccaaccgtattcagggtgcttaggaagctaaaatcaaagcacgcgtcaagagcgaacgaggtatgttgaagactaaggtacttagttttcctagacgaatgtctctggcatacgtagttctttgaccaaagtaagagaactacgtcgagttagtacttccacgggctggtggtctgcatcagcctttgtaggtcatggctacacaatttaactgacaactatgttttttttgttggttaagtaccttttccagattgacgtacaggttcggagttgtactacaggtgtgccgtggccacgcaccctccaggacaaacaaggggcaaggacgcaaggtactctttcctgacgtccctgtcattgtcgcttgtatacaagacacggggtcagatgaaaacgtaagtttattttactggtattctggatagacatcattctagtgtattttgtttgtagtgtaggctctcacgatacgagacatcctggagcacatatggcagatcgagcccgtctgggtcacgaggtatcatggaacacatgtggcagatcgagcccgtgtggacccacgcaagtgggtacgccagcaacatacatgcttagggaacacatagctagtggcgaggaaggcaggcgtcgcagcactgcagtctccgtcgccacaagaaacccacgcgcaacgtcgcttgaaggcaggcaccaggtttatgcgaaactgcctggcgccgggaagctagcacacaacctgcacaagattacaacgtacatatataggattaccaaaacattaaaaaagcactggcattgagtataggtaagcccagcttctagaacgctactagtggaaggcctaaggcttgtagccaacccaaagacttacagagatcaatctcactttgtacttatccgcgaacaaccaagcaacgccaacttctcaacgtactttcggtatgacagaccccatttggtagcacttgttggtcccctcgcaacagtgatttgctcaaccttggagaagtcttcggacaccggctggggattcgcttctgactgcgcttccccaacctcgtagagggcttcgggcaccggtagacatagatgattggccatgattcaaacccacccgacatttgtcagggaaacgtcagtataggtacgaggcaccatttgtagcggcgcactcgatccagtccggctttagggttcagcggttaggggcggtgcagtccgctctgagttgcatgtttgcttggatgtcgggtcataatggtcgttgcattgaaaacgctgtttccgtcgtttttttagaggctgagagtaatctatgccgctgacaccgacagcggcatagattactctcagcctctaaaaaaacggtcgcgcaccgacttctaccgtctaatccggcacgcagtgcggacgatcgaccgacttctgtgccatcttgccgaggtcaagtcactcgacagggaaaagcgaaagacggtcatccctgatctctgtcacgcccagcgtaaactcggcaatacaacaggtctcgtcaacctcggtgcagccagagtgctagaccctcgtaccacccgtcagcaactcgagcacgacaatcgtctacatgacagcaagatggctcgacgcaagcgtagtctagctactgtgaaagagctgattaacttgtctaacaagcagcaaacacgttttagcgacgtttgctttcgacaatttattgtagtgtgtgaaaatgaatacctttgcggctataacgttttagaagggattagctctgttactaattaggctttgggtcaaggcctccgcgtgggaaacgaagacgaacaagatggcggaagtctaagcaaggagtgctgtagctgctacgccccgaagttacgcgcccaaacacgaacttcacctctctctaattcacttcacagctcactctacgcaaagccatcctggcaaaacttcccgcccgggctcgcaacacattggtggctccggccagcaaatctggagccacatcgtcattgtttcttgcccagcacttctgaccgactgagaaagcaagtcagggcgatgcgaaggcccgggtttgcttgctcgaggccagagacgctattgtcgcgtgaccgctaccctagagggtcagcaagtcacaccgaacatgcatataggcaaaaagaaaagaaacccgaaacattgaacatgcatttagtaggaacgacatgaaaacaacgcaaagagatgagggtaggcgcacaggtacggaatacaaacagaaatacgcaaatgtcgtctaggagcaaagctagccatggatgttaggctagcgataaggattcattttcaaatataccaagaacctcgcacatcgacaccaacaaccgagattacacttcttcactgaccaacactcgcttcaacttcaacgacccacactctcgagccaagggcttctggcctacagtgtgtagaccctcgtgtgtcgttcagaacgacctgtctgcacatcttgttggggttttgaaggagctatggaacgctcttgaagtcggcatccaccatgaattattgtaggaaagtagtatttggccggacaccctatccctatgacaagcttgctacctcgttgtagccaatcagctattttttccctatcatttgaggctcagcgacctattttcatccaatcgtcgatcattagggttaggtttattgtgttcaaacttatttctggaatcgcccggaatttccttgttcgcgcaaataagtaaccatacaaaactaaagatgtttgtcgttctaactcgataaatttaataccggccggttgtagccacttccagacttgaccaagacggagagaggtgattgtcgtggtctcgacaccttagctggaaggtcaaggacggctttaacgacccaacaagcgcagaacgctgtcggccgtcaagtacatggaatgtagaatagtagttcggtccagtaaattttatgaaagattatgtagcaatgctggtagataagcaatcaaaggcatgatgtctactggtactacactgcaccctcagcaccttggccgtcctgctgctgcgcgctcgagctgaagtaccgccccaggtctttggtcttgctcacgcgctcgacgagcttcgccgactccataagagcccacgttctcgctggtcaccttctccgtcgtatacgtcgaccgagtcgccatcggcagtcgtcgtcttggagggagcgacactcactaccgaaccgtggtgccggcggagaagctgttcgccttgccgctgtcgctggaatcctcctatgacgttacattgatctcctccaccgtctcctccgtcgtcttaataacctcggagaccaactctacgcctcctccgtcgtctcgatcgagccggtcgtcaccttgattgtagtatccctcgccgtctccgcgtctccgctaccacggtgcgccagctccgtcgtggcagcgccagccacatgtgcgcgcgacacccacctcagccacggtcgacatctccgtcgtctcgagcgtctcggcgatcttagctgtcttttttccgtctgcactgcctccttctaatcgcgcagcctctgtcatcatgctgcgcgggcctgctcatctccagtttcatcacctgtctagacgtcctgctgctccttctcaccttcctgcactgcatccaggaaccccgcagtcaaagtctcgcccgccacgctctcccccacagtgcctgtagtgtagctacactgcgcgacacaatttttcggacactcacatttctgtccatatctcagcttctagaaagcgttacagctcgctatttagatatgttgtatttatccgatcaatctatagctggcatgtgacgcggagctagattttggagcgcatagataggttagtatacaactgacacgatttcgagccgcgacagagtttcggacaatttttatcttgattaaagtatgcaattcagtgatgactacattaaatcagctaacctccgacaatcattctaatacatactttaatcaagataaaaattgtccgaaactctgtcgcgtcgaaatcgtgtcagttgtatactaacctatctatgcgctccaaaatctagctccgcgtcacatgccagctatagattgatcggataagtacaacatatctaaatagcgagctgtaacgctttctagaagctgagatatggacagaaatgtgagtgtccgaaaaattgtgtcgcgcagtgtagtcctcgcgctgctcgcacgtccgcgtctgctgatcccacgccgctcactctcacctcagctggcgatgaacgcgttcttgtagctccaccccgtcgccagtgcgtacaacaccactgtagcggggctgccgtagctttagcgtcagaggaagacgtaacagactcacagagtctcagcttaagatcgcccgttctaataccagaacgtacgagtccgtacaccttacggactccaagagtcaacccttaactcataactgtgtaaatctcaaactgaatgtatttctctttggtgcggccatgccgcctatggtgtaaatgtatccggttcactatctagcatagtgcacccaggtcatatgcataatcagtggctccgaagccatgtactgattctccacctgatttaggttagacagtgtgtacccacttagtaacccttcgggtaactctcgtgtaaccctgttacaaccacagctgggcgctctggcaacctttgatctacttccggccggcctagagagcttatctttgccgcgtacgccgaccgggacgccgccgagcacagcgcggcggagagaggccagtcgtcttcaatattgatggtgtgggcgcgattgggtgcgcgtcgtaagtgttgacgaagacgtagccgccacttatcagcgcaccgtgccaccgtcgatcatgtccacgagttaggagatgccgcacgcgctaggctccgacagcgctggcccaccgctccttccactagctgtacacgacacatcctccgcttgctcggctgccgactgtccgtcgtgtcaccgctgcgagcttgtccgagcatcccctctaaagaatgagagaaatatatcattacgtaagtggaaatatcacactttctgctgccgtccggaataaatacgtggacgctgattggcgcgagtaattttatatgtcgccagtgtgtctctattgcagatttgacatgtttccggattccggtccggaatctggcaattactgcaccagtctgacgacccttttctcacaagtcgacaaatcacatacattggctcatccgtttgctttatcacaattcacgtaaaacagctaggtagcaacagtcgcttgatgacgacgattattaaattagcagcgtatcatgcaaatcatgttaccactttgcatctttgtcagacgaagaccagctcgagaggcagccggcgctgccgccacgtcaggctcacgagcaggtcttcgaacgtgtcagcggctttgcatgcttgtggcatagctcctcgatggatccgcgctctgaggtagatgatcatcttgttctacaacacagcgcactgcagcggcttccgttgaacttcagctcgtcgcctgatgacttgccaaccttaaggtttttcattacacttgcaatattgaaacgaacagtattcccagagcaaagtggccgccacatcattaagcgtcccgatttggcagggcatgctttgcaatatctcggtttgtatgccatatcgagagctaccgtttagatgtattttattatgatcctaccccattgtattagggttaacaacccgggttttaaagctcccgatagggttcgcatataaattgtggcaccgccgacactgaagggcatgtatatgttagaggttatcctatatactgatctcatgacaacgactcttactttgtgagctggttggatattcccgatcaacttaagccattgcgtttttcttttcaaaatgtttggtttcctatgcagattttcgattggaaaattattgctagtactgtcaatttagcgatacaacgtgaaaatcatttatttcttataacaccaggaaacatattacgtttatcgggggcgctcagatgtggaagcgacagtagtgggtgtgtcggttaggaacatgattttaaggataatgtgccgaaccgctctgtcttccggcgcatcctcgagcctagaaacacgttttttctcgggaatacacaatttctaacacaggtattgctgcccatttcattcgtttaaagcccgataagcattattggatgattccattggataaattttaatcaaaatgacgtnnnnnnnnnnnnnnnnnnnnnnnnnnnnnnnnnnnnnnnnnnnnnnnnnnnnnnnnnnnnnnnnnnnnnnnnnnnnnnnnnnnnnnnnnnnnnnnnnnnnaatgacaaccggcttgccagcaaagtgctgctggtaggtggggtgcgccttggcagcgtcatagacagcgtcgacgaacgcagcgttctcctccatcttgatgctcccgcactgggtctcgtagtgcagcagaccgacctcggtagagaccgcgcactgtatttgcaggttcttgcccttgctgggcggcagcttcacgatggcgcgcttgcccttgagcgcacggccctgcgtgcgtctgcagtataggttgtagtttgtttcatcgtagtacacaatgaacgcaccttcagcactgtacctatgcaagtcaagggcgaactgcttgtgcttctgaacattgacttcattattgcaagttgcaggctcgactcgcacctacattcgtatcatagtgttatatcgatacataggttccgtaatgctagcataccaacaacaccatcgacatacctgcttgactgtgtacagttggcccgtgagcttctgcctgatcaaggacgtgctcaaatccacgccaaaatcgacccacaccatcgtattcagctgctccagtgtgagcaagcagttggcctctacgtagtcgaccagcgctgcctcaatctctggagtgcacttgatattggcggctcgagagccaccgcgctgcttcacctccggactcccgctcacgacgatgcggcgagcagtactccgggggatgccattgtgcttggcgacaagctcccagtcttctccctgctggtgagcgtctaagacgcgcgcgcgagccgcgaggctgtgcttcggctccttaggcatgagccagtcgaggtgaagtgcaaagagacagctctctgagtgctggtgggcgcgaattctactctccagtcgttctgaattgctggtgggcgcgcgcgggtctcctcatccagtcgtagtccgtttgaactttaaaaattccactttgacgtgaaacctaaaaataaaaaatgacatttgaatttccatcgttatattttgccaaattgaattgcactaagaccaccttgaagtggcaaatgtgtagtcgttgtctgtactacgacaacgactagggctcagcgcaccgctacgcaggcgcttcgccatggttattagggacttagacaatggtagggcgcccccgttccgctcgcggagctcgctgcactactcgcagcgtggggccgagtaattgatacagtccggccctgcgggccctgaagttcgtactcatgagataaaacgtatttttgtccaatgaaaattttgtggattgtgggcgtgacgaacagggaaactgctataagaaagggtgaatatccacgaggaacgcgacattgtcagctgagatttgtccgggtgggtttgataagatccgcgggtgggtgggtttaggttttgtttttttaggacccgatgacgtcatggctcgttgctgggaacggggccaggtgagaccgtcctcgatactgtttccttaatgaaatcctgtcaaatactctaaaccgtggtttgccgtggctcgctccccacttatcgcgcaaattggcaggctaacactccctctaaccctatgcaatagcgtgtttagtcctagagacagagataacaggcaaacggttgagttcataggctcagttttcaacttgaacactttccatcaccataagccgcggaaggatccggtctggaatgacgtagtcgtggcggacgatgtcgtctcgtgtaagaagtgcgagcgtatcatccacctgctgggagagacgcatgtcgaacgcgtccgcgaccacttcaagcgcaagggctccaagcgacctgtaacgaagccgattacagcttgccttccaccggccctaagccctgcgaagctgacggctttccaacgacagtttgcgctgtggttctattccacgggtatgacattcaacaaggtcaatcacgcaacgctggtgaaggcgatggctatccttaaccctggcgccgtcctccccaccccccgcgagcttgcgaccactttgctgtgcggatcgtgcggcgagttgaagctggtcatggtgcaccgtgtggcaggaaagaagtgcgacaagagcgttgtcgactacatgttgatatgcgaggacgaaacctacttcctgggctccgttgaaggagtggctgggcttggttgcgctccgggtcgaattcctgagcttctggctgacctcttcttctggctgcacgacacgctgcgggtcgtgttggcgttctaagcgtctttcgcgccgatgctggttgcgtaggccccgccgtatggccgcaaccaggcccggaaactggcgggcgaagcagatgggggtccctatgtgacgtctgagggatgcggcatgtcgaaaggggatcaggcaccgggggcaggtgaacaccatttaggaaatgaagtatgtaggctgtctggaaggtgtgccgagatcagtcctcgatttttaggagcccttaaatagtcctctgtgctcattctatttaaaaacccgcaattttgatgaaacgggcgggcgggtgttttgcaaaaccccaaaaaaccttcatcccaattttcgaaccctggatattgtgcgtcgcatctgcaggaagtcggcgtggaggaagtgatcctgcaaacgcggcaccgcttaggtgtaacggcagcagagggcgaagcttctaagctttactgaccataggcgcacctgcactattgccccgcactggtctgacatgatgagcgtcctgcaattattatatataagatttaaactggtctgacataatgaacgtcctacaattactacactgcaggacgctcatatgtcagaccagttcaagtcttacgtcaaggaagtcttgtccggtcaccgcaaaagccacgtgtacactcttgaaatcgacagcatgttgaagggcatgcggtgcatgcgccaatgggttagacactagaagagctttgtcgaccctaccaaatgtgcgtgcaccaaccgtattcagggtgcttaggaagctaaaatcaaagcacgcgtcaagagcgaacgaggtatgttgaagactaaggtacttagttttcctagacgaatgtctctggcatacgtagttctttgaccaaagtaagagaactacgtcgagttagtacttccacgggctggtggtctgcatcagcctttgtaggtcatggctacacaatttaactgacaactatgttttttttgttggttaagtaccttttccagattgacgtacaggttcggagttgtactacaggtgtgccgtggccacgcaccctccaggacaaacaaggggcaaggacgcaaggtactctttcctgacgtccctgtcattgtcgcttgtatacaagacacggggtcagatgaaaacgtaagtttattttactggtattctggatagacatcattctagtgtattttgtttgtagtgtaggctctcacgatacgagacatcctggagcacatatggcagatcgagcccgtctgggtcacgaggtatcatggaacacatgtggcagatcgagcccgtgtggacccacgcaagtgggtacgccagcaacatacatgcttagggaacacatagctagtggcgaggaaggcaggcgtcgcagcactgcagtctccgtcgccacaagaaacccacgcgcaacgtcgcttgaaggcaggcaccaggtttatgcgaaactgcctggcgccgggaagctagcacacaacctgcacaagattacaacgtacatatataggattaccaaaacattaaaaaagcactggcattgagtataggtaagcccagcttctagaacgctactagtggaaggcctaaggcttgtagccaacccaaagacttacagagatcaatctcactttgtacttatccgcgaacaaccaagcaacgccaacttctcaacgtactttcggtatgacagaccccatttggtagcacttgttggtcccctcgcaacagtgatttgctcaaccttggagaagtcttcggacaccggctggggattcgcttctgactgcgcttccccaacctcgtagagggcttcgggcaccggtagacatagatgattggccatgattcaaacccacccgacatttgtcagggaaacgtcagtataggtacgaggcaccatttgtagcggcgcactcgatccagtccggctttagggttcagcggttaggggcggtgcagtccgctctgagttgcatgtttgcttggatgtcgggtcataatggtcgttgcattgaaaacgctgtttccgtcgtttttttagaggctgagagtaatctatgccgctgacaccgacagcggcatagattactctcagcctctaaaaaaacggtcgcgcaccgacttctaccgtctaatccggcacgcagtgcggacgatcgaccgacttctgtgccatcttgccgaggtcaagtcactcgacagggaaaagcgaaagacggtcatccctgatctctgtcacgcccagcgtaaactcggcaatacaacaggtctcgtcaacctcggtgcagccagagtgctagaccctcgtaccacccgtcagcaactcgagcacgacaatcgtctacatgacagcaagatggctcgacgcaagcgtagtctagctactgtgaaagagctgattaacttgtctaacaagcagcaaacacgttttagcgacgtttgctttcgacaatttattgtagtgtgtgaaaatgaatacctttgcggctataacgttttagaagggattagctctgttactaattaggctttgggtcaaggcctccgcgtgggaaacgaagacgaacaagatggcggaagtctaagcaaggagtgctgtagctgctacgccccgaagttacgcgcccaaacacgaacttcacctctctctaattcacttcacagctcactctacgcaaagccatcctggcaaaacttcccgcccgggctcgcaacacattggtggctccggccagcaaatctggagccacatcgtcattgtttcttgcccagcacttctgaccgactgagaaagcaagtcagggcgatgcgaaggcccgggtttgcttgctcgaggccagagacgctattgtcgcgtgaccgctaccctagagggtcagcaagtcacaccgaacatgcatataggcaaaaagaaaagaaacccgaaacattgaacatgcatttagtaggaacgacatgaaaacaacgcaaagagatgagggtaggcgcacaggtacggaatacaaacagaaatacgcaaatgtcgtctaggagcaaagctagccatggatgttaggctagcgataaggattcattttcaaatataccaagaacctcgcacatcgacaccaacaaccgagattacacttcttcactgaccaacactcgcttcaacttcaacgacccacactctcgagccaagggcttctggcctacagtgtgtagaccctcgtgtgtcgttcagaacgacctgtctgcacatcttgttggggttttgaaggagctatggaacgctcttgaagtcggcatccaccatgaattattgtaggaaagtagtatttggccggacaccctatccctatgacaagcttgctacctcgttgtagccaatcagctattttttccctatcatttgaggctcagcgacctattttcatccaatcgtcgatcattagggttaggtttattgtgttcaaacttatttctggaatcgcccggaatttccttgttcgcgcaaataagtaaccatacaaaactaaagatgtttgtcgttctaactcgataaatttaataccggccggttgtagccacttccagacttgaccaagacggagagaggtgattgtcgtggtctcgacaccttagctggaaggtcaaggacggctttaacgacccaacaagcgcagaacgctgtcggccgtcaagtacatggaatgtagaatagtagttcggtccagtaaattttatgaaagattatgtagcaatgctggtagataagcaatcaaaggcatgatgtctactggtactacactgcaccctcagcaccttggccgtcctgctgctgcgcgctcgagctgaagtaccgccccaggtctttggtcttgctcacgcgctcgacgagcttcgccgactccataagagcccacgttctcgctggtcaccttctccgtcgtatacgtcgaccgagtcgccatcggcagtcgtcgtcttggagggagcgacactcactaccgaaccgtggtgccggcggagaagctgttcgccttgccgctgtcgctggaatcctcctatgacgttacattgatctcctccaccgtctcctccgtcgtcttaataacctcggagaccaactctacgcctcctccgtcgtctcgatcgagccggtcgtcaccttgattgtagtatccctcgccgtctccgcgtctccgctaccacggtgcgccagctccgtcgtggcagcgccagccacatgtgcgcgcgacacccacctcagccacggtcgacatctccgtcgtctcgagcgtctcggcgatcttagctgtcttttttccgtctgcactgcctccttctaatcgcgcagcctctgtcatcatgctgcgcgggcctgctcatctccagtttcatcacctgtctagacgtcctgctgctccttctcaccttcctgcactgcatccaggaaccccgcagtcaaagtctcgcccgccacgctctcccccacagtgcctgtagtgtagtcctcgcgctgctcgcacgtccgcgtctgctgatcccacgccgctcactctcacctcagctggcgatgaacgcgttcttgtagctccaccccgtcgccagtgcgtacaacaccactgtagcggggctgccgtagctttagcgtcagaggaagacgtaacagactcacagagtctcagcttaagatcgcccgttctaataccagaacgtacgagtccgtacaccttacggactccaagagtcaacccttaactcataactgtgtaaatctcaaactgaatgtatttctctttggtgcggccatgccgcctatggtgtaaatgtatccggttcactatctagcatagtgcacccaggtcatatgcataatcagtggctccgaagccatgtactgattctccacctgatttaggttagacagtgtgtacccacttagtaacccttcgggtaactctcgtgtaaccctgttacaaccacagctgggcgctctggcaacctttgatctacttccggccggcctagagagcttatctttgccgcgtacgccgaccgggacgccgccgagcacagcgcggcggagagaggccagtcgtcttcaatattgatggtgtgggcgcgattgggtgcgcgtcgtaagtgttgacgaagacgtagccgccacttatcagcgcaccgtgccaccgtcgatcatgtccacgagttaggagatgccgcacgcgctaggctccgacagcgctggcccaccgctccttccactagctgtacacgacacatcctccgcttgctcggctgccgactgtccgtcgtgtcaccgctgcgagcttgtccgagcatcccctctaaagaatgagagaaatatatcattacgtaagtggaaatatcacactttctgctgccgtccggaataaatacgtggacgctgattggcgcgagtaattttatatgtcgccagtgtgtctctattgcagatttgacatgtttccggattccggtccggaatctggcaattactgcaccagtctgacgacccttttctcacaagtcgacaaatcacatacattggctcatccgtttgctttatcacaattcacgtaaaacagctaggtagcaacagtcgcttgatgacgacgattattaaattagcagcgtatcatgcaaatcatgttaccactttgcatctttgtcagacgaagaccagctcgagaggcagccggcgctgccgccacgtcaggctcacgagcaggtcttcgaacgtgtcagcggctttgcatgcttgtggcatagctcctcgatggatccgcgctctgaggtagatgatcatcttgttctacaacacagcgcactgcagcggcttccgttgaacttcagctcgtcgcctgatgacttgccaaccttaaggtttttcattacacttgcaatattgaaacgaacagtattcccagagcaaagtggccgccacatcattaagcgtcccgatttggcagggcatgctttgcaatatctcggtttgtatgccatatcgagagctaccgtttagatgtattttattatgatcctaccccattgtattagggttaacaacccgggttttaaagctcccgatagggttcgcatataaattgtggcaccgccgacactgaagggcatgtatatgttagaggttatcctatatactgatctcatgacaacgactcttactttgtgagctggttggatattcccgatcaacttaagccattgcgtttttcttttcaaaatgtttggtttcctatgcagattttcgattggaaaattattgctagtactgtcaatttagcgatacaacgtgaaaatcatttatttcttataacaccaggaaacatattacgtttatcgggggcgctcagatgtggaagcgacagtagtgggtgtgtcggttaggaacatgattttaaggataatgtgccgaaccgctctgtcttccggcgcatcctcgagcctagaaacacgttttttctcgggaatacacaatttctaacacaggtattgctgcccatttcattcgtttaaagcccgataagcattattggatgattccattggataaattttaatcaaaatgacgtgtaacacctgaaaacaacggctgataatccgcgtctcagaagcagcatgcaatctactcgcgcctcagatatctgggcacctcccttatatgtctaactagccgagcgccgccgctacgtggcggaaggttttgtggttaggtgcagtagtgagggccgcccacctccgcttcgctccggtgggcttcaaaatagaacacagtgttactccgcgggaggatagcacaacttgtttcgagcactatgcaatgttgtatggatcggtggccctatccctgtgctgacgtgctgtacaggactatatatggagcgtttgttgtatctcttcctcctacgcgtcttgtgataggatggattacaaatactaaaccaccatgtaaaacaacgtggcaacccagcctatgtgttttgtgtacacaccgtaccgaactcgtacttatatgattaattttttcaagacgtcgtagccgcaaattgtgtaacggttagtacgcgtatccctcccgggctatgccatgccacaatgcgctgtcctattacgccattcggtcgcaccgttctatcgtatcgttctatcccgcccgatctatcgcgccgttctatcgtgccggcctatcgcttgtcctatcgtgctatctttctaaggttagcgttgtatgtaagtattgtgcgcaaccctctacggcgtactattcaacgactatatgtctggagtttagtgcactgtagcatgcgttgaaccgtcaaggcaggcaacccccatttccagtctcctttctatttgaagcgcctctttgagtgtatgaagtatggagcactaaagtatcgattgccaggacaaacagatcgcgtgtccatttcgtagcttttagtaatgtactgtcagcatgcgggcacagtaccgtgccctatgtcactatccgcacgcattaaccgtagcgccaattcttcaaaatcttgttttaatacgaatgtatataaattcatagtatattcctgtgtattaagcaaaagcgttaaaaaagtatcaaaatgtttcagccaacgggagcgctgtattttttatttattgctgctgcatctgctgctgcttctcccgttcgcttgggcggtggcgctctctgaagcgcagcttgcgcttgcgcttcttgggctccgtgagggggtcccgcgctggcttacggcgaggcgccgggttcatggcccggcggacctcagcctggcgctcttcgcgctggcggcgcttgaggtcaggtgccgtgcgcggaggcagtgtcggggggtgccagtagcgctcgcgctcaggtctatccctgcacgcaagacacctgcgcgaggaccttcgcttgggctcctcgccaggcttgcagaacgactccttcaagaggaggtgttcgcagcacgcgcacttgaagcggcccagtgggcggcccgtgccgagcggcggcatggtcaccatggccgcgcacgtctcaaatttcacgcgctccatcgtgaaatgtatgtaaagccacaaaatatatttagccaatcaaaaccgttttaattttttccaatcagagcacttaataccacaaaagttagcctattgtgctcagcactggtcggtaccaaatcgtgaccgcgcaggtcgctagactaccgctatgactatctgatgcccatggcatagttgttggtgagttagtgcagatgtagctggcgcaggttaccttgccgcggagatgtccgcgcgcgtgtgtcgatttcaatttggacccgaaatgtttgcattcagtttcaataaagtacgattagtgtggtaaagcataagtttgtgacgcgccgccgtcgctccgctcggtagacaatgggggggccgccttcatcggccaaggttgcaaaaacagtgcccccgtcgcttcgctcggcggcctaaacgcacggactgacacacgcagccacggtcagatccctgaagtagttgtttgggatagtgtgacaatgaaaagcgcgaatttggcgggggttatcaacgttcctaacattcgttttgatttgcagtgttagacccttgtccggaccccgcttcagcaccgctgcagccccagggccgttacaacccgcagaaagggtagcagtagatcagaattagagttaatacatattatacgctctagccacgtgtatggctgcaggaactgtgggttggcgagaagccagcacttttggtttctctccggcagctccaactactctcccctcctcctcattatctataatactggtagcacttgctgatccagcttaagtgacagtgaccgtggctccgacacgcaagcaacaactcctagacgcaggaagccaagctgaacttggtatatacctaacgacatggtatctcctcttgttaggttcattatctttggcatcctcgacagggcgcgcaggcagagcccggacagcagcccctgcaggttcccacctccacgcgccacttcgacatcgtgcactgacgacaacaatggcgccggctggcggttgctccgcttcagcgagcacttcgcgagcttcggcttcgatgccttactgagcggttccgctggtatatcagtcggtctgatatttttttcgcagtttgactttatcttcttacattacttgcgtcgtttcacttgaccgtggtcagtattaacttgacatcacgcgaggcacagcattctcgctctgcgtcatcgatcggtgctactggtgctccagatggaggtaaaccttgcgccattgaaatggtctgacgccgatgctaacttatctgctcactgctgtatgaatggaggtcgcttccatatagctatacgctactaccgactgacttcgaattcggtcatccgcaagggttttgcagtcctagaaaaataggcggggctgccgagcggcttgacccccgaacgcgcctttcaaccgatgagagcaattaccagtgcagcattgctcggcaaatggtgggagacgctcccaagcggtcacacggttgcgaaatgcagttaccgacaccgacgtggacactgttctggttgatcactaaggtcgtcatcgagcatggcatagatgatttccgcatctttaatgtcgacgagaccgctttcgagagcggcaagaagtctcaacgggatgggattgcgtggcttgcgcaatgtgtggaacacggatccctccatccacttccacccctcctttgttgcatgcgggagcgtaaatgggtttatagtccctccgcttttcgtcctgcagaagactaagacgaggaagcgaaaaacgacttccgtggcagggaggatactcgctcgggacatgttcgatcaaaacataacgcctcaaccaaagcaacgaaagtagcgaatggtacggtcgaccccgggcagagcgcaaactaataatgacgctcaaacccacgcgaacagtgttacaggcaatgatgcagacagggtactgtacattgctcagttgtgagttgggcgcgcaaagtaaattgctgagttgtcaggtaagcaggcagaatactttactgaatcgcgaggtaccccaactattctacatcatttgatagcatgcataatttgtatgatattatatttcccaactaagggaaagtgcagtgtactactgggtgtgtggttactcctatagaaaactgaagtgaaatcaccgccataaattgataagttggttcaggaacagtcaccttatcgtttgcccgtttgcacgctcaaaatggctcgtgggggcaaaacaatgagctgcgaagccgctgttttcgtttctatagtgttttcgataggaatcatcgccgtttaaaagatatgcatcgtccaagtcaaggcacctgcaggccgctttaaattggtcgggccccttagagctttgactgaggtgggctttgttcatggcgttcatggtttcatcacgcgcgaccttcttcactccattgtgccaccgttgatagttcctcggggtcttgagccaagaggccaacacgtccatcgaccttggttcatctgctgattggttgtcagattcctaaggacgctttgtagtgccttgagacgctggttctcccatcattctttggtcgcctcggaagtgtttttgtgttgctttactgcaaaagtgagctgatcccgttgcaaaaatcttcttcgattttttaaagtaagttcataaatgtttattttttgcaaatttctcgtcgtattctttcaagtatattcgcacgacagtggcatgccaagcactcaatgggatagagacaataagacaccaggagcgccatcagccatggatgtactcatgcggtggttaagaacttacgggaactgcaagcgctggcacgatgacgatacgacgaaagctctgtgcgaagggtcagcttcgggctcaaggcatcgagactcacacatccaccgccatttaccgaaagtcgctcacatgaaagtccgcagcgacgctatcaccgagtggctcatagcgagtcaacaatatgagtcataccagcgtggtgacgtcgacaagagcctgcacgatgaggtggagggacgctgcccgaattatggggatctctcacacttctttcatgtcgacgaattgcagttgggagcgagcggatgcattctagagctcaaggacgtcgagccccaactacacgaagtaacgttgtggtgctgaaagataatacgctggaaagtaatcccaggttgctttaacagaagcaaaagcacgaccccagtagagcccaaggcaactgacgttcgtgcaaacgtcataaacaaacgacgatggactctccatggtgaaaatgcctggtagcgcaacggaggcgacaggacctcctatcgatccatcatttcgtggccaggatgagacgcattgggccgattggggccgcaaggaagcggggttacagcactcctgcttgatattcgctcacttgagcgccccacagctcggtcacttgtaccttcgtgcagagaaacctcgcttatttacgccagagcaaggttgttaggaacagcatgactatgacatatttcttaaaactcaacgatataatgcgagcacagtcaacaaacgttgcaagtgccctatcgttcgtactggctttcgctcaccctgaggccctttaaccaatctcgcttagaggaaaaagatggtacttcggagtttctcactcaattctgggattgtgggcctggaggaagaaatcgacgacgaaccagacaatgcatcacgggcgcaatcgtatactctggtgcaagctgggcgtaatatatcggcggcacaatagaaattgaccgaccgcagctggcgtagttcttcgactctatcagtcattttcatccaccatcactctatactgagtcggcacacttgttccaaaaaaggtagaactcgaaacactgcgggtcaacgagcgttcctgagtcaacaatagttcctaccagggggggggggggggggttgcactgccggctctctcgctgggactggcaccatcacgagcagaacatcgaagacggtgatgtttattggccaccacaaatgtaacgcggggctcataatctgcatcgagcatacggaatgccatccgcaacgcccacatctcggcattgaccacatctgaaagacaagacgccggcactccagcgcgataatacacgatgtgttttggctgtcgccgcaagcgctcgtagcttccaaggaaaaactctcacaggatctgaggcaagtgcgaaaagtcactgggtccatccatcttgaactgaccagcgggcagcatacgcggacgaatgccgatccagtgaaaccaccacaaacgagatcgcagggtctctgcctttgttgaacctcggataggagatatgtgtgctgatcgcaatcgtaggctcttcgtgcaccagaggcagcgctccttcaagaaacttcgtatcgtgtacacctaatttggcattgatcttgaggcacatgctcgtcagcgcctgggaatttgtacgccggaccacccgtgccgtaacacactggctgggaatgcctcgctcggtattcatcactctctggatcactcgatactccatggtatcctggttagtcgtgattacgacaatcaactgggctccccgcgagcggttatgctggtttccaataaacaatggcaatgggtgagccagctttcaagaggccactatcgtttatcaccacgacaggatcgtgattgtgtacacgtacgccataggtttcagcttcctgtcacagattctcaacaaatctccgagcaacgtcgcgagtcacacatgaatcacaaccggccaatctgcggcagacgacgataacaccccagtttgacagagtgtacggccaggcaaactttgtgtctcgcaaactttcgggtgttgtaatttgatgtcattctgaatgcagggtggagctagcactcgcaccataacatcctccatctcctcggcaaccgagacgagaaatgctttgaagaaagggaaattttcaaagcccaatgattcaagaaatggctggagactgtccctacaagcttcaggttggacggcagcttgggtagcacctgcgttgagcaatccgatccacggtagggttggccaggagctacctcgcacagctcgattggaacccaactttcgaagccttcaatttcactgtaagagaggaaagcgcagccgaagtacgagtggtatcataattggttgtctgaaatatgtcgcctacaatcacaatcacctacgtataacagcgtgcaaacttggtgcagatgcagcgttagagacccagcacagaggtgaaatatttggctgtgtcttttgtaggtatctcgtcctccgttcgaaggtactttgccgtctcttgaataaaagtcatcatggtattccacacggttacgagcagatccagctttcaagccagcgcttagtgcacacaaatgaggcctgacatcaagtgccgtgtttgtgaatacttcctgcagctgtctcaactctgttgtcttcaccagacgaagacgaagcgtaaattgatgaaactgtttctttgttcttggaagagccgtttcgccgtcatccctggtagccgaacgaatgtacaattaggcagcagcattgtgcaagggcagcgcggcaggtgcgaacaaggagttcgctccatcgtgagctacccgagtaccaccaaatgcgtgttgattttgacggatagggtcttgcacaactcgccacaccagcggcctcgatgacgaaagcatctccgtggctccattgtcggctccaccccaccccacgtagacatgatagcggaaatttacgagtactccgcagtgtccagggaaactttgtagtaattcgacttcgggtacaaagccggtggccgttgatcactcgcatctctcgtgtcagtggcatcatttcggggtcacgaacgagttgaactacatgttcctgaagccggtcgctcgggtgaattgcggggtcgtcacatctgtctccaacatagtagttttaaccgtgatggcacgcacggcttcttttgatctccacggttccttccgtcgggggactacggcttcctctagctcgcacccaacttcgccaccgcccgcattctcgccgagtagagggctcggcaccttggcggggtcgtaaccggctgcggggcaagcgggtttttcttcattcgtatcagcgtatcagtaatagctgctatcgtggcggcgtctgtctctatagcggtcataccgtttaaagctcgcactgcggcttctgtcacagccatcgcgccttagattgctccagacgccgcttcttcaccattccgagctgccgtctcgagacatccctcgctcttctcctgtagatggcgagaagtcctgtagccggtcccacacgccgacaatgggaagatccatccctgccagtaactaattaactactaacgttatatcaaccagctacctaactacaataactgtcgtcgacgaacactgactgctgaaagttgcagcgctcatattagaaacgtgctccgcgtcaccttgctctatcttcgccctcactgctcttgaagactttctgcgtttgatcagcaatatgtgggcaactcaagcctcgatgcatttctacgacaacacaggggctcaaacaccacttgattactttccaccttgaagaaggcaagctctgggacgtatcgtacagccggcagtacaaacaggccatccaaccgtccgaaggggtctccgagctgcgtcgagaaagctcacaactgcccaaggaattaacgagggtatatgaggtgttgaaggggtcgcgcgggtttgccaggcctgacgctgggtgccacctgaaagagcgccgcccacgccactactggtatcaccggcgctaaagtccttatcggcgctatgtgccaggccgatacgcgagctaagcacagaaaccttggctgcaggagtggccgacgagaaggaggaggtgagaacggcattgtctccagctgcgtggatgtggacgttgaatatcgccggggaactagctttagctttttgtgaggcggggcaagtttcgcagcgtcaagcctgcgatgccccacagatgattcccactgggcaattgctgcaaagaggccgcgaaactcgaccataatgacgagaatcatgcgagtgcgggtgcagagaaagcaccaaacgcacctggtgggcggcgcctttctcggaacgataggcagtttgaatttacgctggtcggttgaatttaggtagtcgcacgccaacttgcaaaaaaatcgcatgtaaaaaaggagcgatattcaccaatcgaaatcgatgttttcgacttggtctcagtactgaaaaagaggcgagcatgttccactataatatttcacgcacaatgagccaacttcaaaattaacttcaaaatgaattagtaagatatcttcaagaaactgctcgcggcgtgcggcctccaccacctgcagtagcataccttcgtgctcgtcggctccgcgctgccttgctctgtcgacacggcgccggacgtatcatgacgctcactctattgttagcgctcatacagcgcatcggagcaagagtggcgtcgtgcaggcagcccaaagcagcgcgcaattgagcaccggaaagagcaccaccgcgatgagaactcctcagagttagaggtcttcacgtcttaatgggtgaagttgattctgatatcacctgcttcgagcgccttcgcacggtggtcggattgagacgacctccgacaaggtcatcgctgccgttagccagtaatgttcaatgcaccttattccgaaacaaaacggtgttcaaacaaatacacttaaccacaactaaatcgaaaatacgagcgttgaaagttagctaaactaccgaattagcttgctttcctttactgcatgcaacaatgttgcgtattgtgagccagcattcagccaactacaaactgtagctctttggcgcaggtccaacaaatcgctgctgtcctgagggtgccaacagtttttccggactcaattggcgctagcacgcgtgtacaggatgaaccgtctttcaccgcatgtctttttttttgctttcacaaaaatactagtgctcgtccgatggaaatcgtccgacccgacgaactcgtgtccactccaagcgatgcagtacgtcccgaaatctcatcagttcttggattccaatacacagacttgagacctgtatgtcttggctcacttcccgccaccgattcatgtctttcaacggatgcactagtatggctcgaacacgccagtagtcctcggttaattgtgcctccaagttgtccaagtccaagcacgccgaacactcttccggttgatgcgccagttcgtttacgtcttcatcagaaagcttgtcaaagcattcgacaacacatctgataatgttattcatggatcgtttacgacttggacatttcaggcatggtaggacaatgttagtttgattcgaatggatattttttgcatatcttacctgaccgttcttgataacaccacaagacttcgtgattgccgcctccgctgagccgaacagttgaaagctctcaaacttgactacgtcttgctgtgctttggcacccaactctgtcatattcttgagtgcttctagttcgttgctcttctcccgtagctggatgtcataaatcacgccttcttgctgctgctcctctatctcacgcttcaattgactcacatcatcctgcttctgtttcgcctcttgttgaactttcgttagcactaggccgatggcgcggtcgagtgggttaagcttctggcccttacgctgtggaccgagggttggagccccacagcggacattagtttctccgagcgagaagcgcaaagaacccccgtagaggaacgtccctcatggcccaggcggttagggcaccccgatactaaggggaaatagacgtagttaatagctgtacgaaggacggtttcactgtagaaagtaacagccaggacctcggcggtacgagaaattcccgtatccacaggccccagatgggttagggggagaaataattggcctatcagaaactttcgttagcccttcttaatgactttccattaacgtcaatattttttatacaacgatgttttgacccccccctccccgtggccttcagcatctcaaattcgttaaatgcgctgcatagcatcttgtgaaagtcatatgtcaatttcgtgaactcctcgaatgttttgataccgcgtctggcaaattccgacgtcgcataagctacacctgctgggccgaaactcgcacaccagtgtaactgcgttgtctcggccgcacgaatcagcgcttcttgctgagccacgcgctcttggtctgcagaactaaagggttcccttccactactcgaaaccggtgaagaggacgaagcagtagcatggcgctcatgtagaccaacatcagctcgctccggcttattgctgttgaatgcgcttcgattatcaaagtccgccatgaccctcttccagtcaaactgcactcgcttctccttgccatttactcattgtttcattttccgcacaagtgcttgagacgctcttggaacatgccaatagctgctcttgcactcgcctttctgagtgagtgcttagggggtgctgtttctttcactctgcctggaccgttccccaatcgagcttagttgtcttcttcttcttggcctccggtcttgtaacattgtagtaatacaggaggtcgtcctccatagtccacagcgatcgcagcgttgacttgtgcgttcgccgcggagaggatatcttggtgccattctcatcatggtcagagcgagcattattttcgacttctcagtagagtcaattcgggcgcttgatttttgacaatctctgacccggtttgtagacaacattcaacttcgggctaccttcacggggcattcgttgaagaaggcggttcgcgtaggagccctacaggaccacgtcgccacaccaacgagcgaccgccagcactgcttgtgcgtctctgatatcaaggataaggccttcgtcttcttgaaattcaggctatgcgaccgttaaacatcgaacccatggctgcttaatcggcggtgcgccgtggcacgtccccacggacaaacatgtcaattgcgcctctctatcgtaggtgaggagccatattcgcgttttgttcggagctgcagtattttaatttggctatctggtgttgaatatgtctgattcccactggtgcgagaaagcacctcaggatctgcagcgcgatcactcaagttggcatcgtagcaggtaaagactcgggtctgcactgcgcgcgtgcttcgtctgatcctccggcgcggctgctccagtctcccgtcggtcttgcgcgctgtagctattctatcgcatgtgctctacgtggggtcgccatggttctggggttggggcgccctattccagccgccatgtacctcagccttcagccctgaacgaggcttagagcaagcccatcatgtgccggataggcttgaggaaatccgttggttggggacagagtcaccccactccaactgtactaaaatattgccgccgtcgaacatgaagtcggtgcttgaacccgtatgatatcctagtacatgtgcgtcttggagccctgtgtccagtggggcggtgtgacggtaagcactggtaatctcaatgcttcaggctgcgggtagcgactatcaccagcgccactatgcgtaatgcatcctcgtaactgggacagctgcttgacttgcacttttgcacccctgcccccgtcgctgaacattgtgttcttctattgtatttcagaacgagaaatgaatgcattttggcactgaaatgtgtgcacgatgtgaaaacagatttttgtctgcacccatgtccgaccccatggatacgcggaccttttggtgaactgcgattggttgcacgagatggatatccggtagagacgattgtgacgtgtgaattggggatgcgtgtgacgattcggtgggaaccggcacttgcagcaagcatgggttcacaggattggaaatgcggccaccgtatgagcgctcatattcggggtagagttacgtattctgtccgtccgccgacttccctaactgtaggatagacccaaagcgcgaacgcgtagccagcacacgtatcctggctactgcactggcttagtcaagttgtcggactaccccactgaatcggccccaactgccatgattgcacgcacacaaggccctgttggatgcattcatttctctttctgaagcaacgctagaagaatacaatgtgtagcgacgggggcagggatgcaaaagcgcaagtcaagcagctgtcccagtcgggacagatacaagcatgtatgccgtagatgatcaagaagttcaatgccaaacgtgtcagcctcgacattgagctggacgaaacgaaggaagcctgtcacgatgttggatcagaggtgggcgtgttggaagccgcggttgccaccataaacgactgcgcagtgcaagactcgcgccagagcacctgcaacgtgtccaaagagtatgaaccgtacttcgcggtaaccagtgtgaccaactctgatacgggtcccgtacgcctttatctccattgtggacaggaccaacagctccatcatacaatccttcaactcacgatgcccgaaaaaacttcaacgcagccgaacatatcgtcaagacaccggacgcggtagagatctcgcctactttcttcgcgtaccaacccaatctgctgttgaggtgccgagatgagattaaccagcttgatgccgtcgtccagcgccacaattctgtgctcggcgcagatgtggaggaagcggagtgaattctggcggatgcccacgcggcgctgcagaagacaaatggccagtacgatgaggttcaaaagatgttctccgggtcgaagagcggttttgctactagctgccgaatagcagctgcacacgcgcgtgatgcagctctagaaaacaaaatattttttttgcgagagcagactcgctgacctctagagccgtgcgctcctcaagcgcgaggagattccgcacaagatgggcaatgcctgtattgaaattacagcaaacccatccttcacgtaagaccaagtgatcgcaatctacaaccgacaattgatcggacgcagagcctatgtttgtgcttgagacggagagtgtccctgtgcgcggcaatcatgacaaacgacgcgacgaattatttgacgacaaccgcgacgtaaatccggtactggagcgcgtgagcaaggacaacaaaagtaaccatgacgcacttcgtgctgggtcgaagcagccggaagcgttgttctcgtatggggaggacttactaggtgcacaactccattctacgccattttagtgtcgtttccggtttctttcatcactaaataagcattatgttcagagagcatgcatctatatacgctttcgttttctgcatgcactgtcccctgtcctgtcctgtacgacgcatacaaacattggagaaatgtagctcattttggcaatggttcaaggggtgagattctttgatttctgattgacgagcaagatgccgatcgaacgaaaaccccttaacccccccccacttatatctgcaagtgtcttggagatctcggaataattgaatttccgcatgccttagaaagcaattcagatatctacaccacggggctttcgcctacaagccccgcacgttgaatgtattatcgcatgttgcaaataaaacacccggaaaaccgcaacatcgtttttaaaagtgtgcgttgtatgcaacatgcagctactaaggtacccagtcgagctcaaaccttcgccgcccacagctagtgaggtccactgaaccgcaaaacgtcagcccacggcaaactagcgccgcaaccagctccagacgaggcacagcgtggagtgtagcccctgggagaagaagctacaatcctttgccacggacacttcgtttcagagctgcatggggagctcgctatccacatcttctttcggcacacccgcggccagcactttctgtaatgagagaaactgttcacagcgcaagcgaagtccttagcgctcaaaacccacacgcatttggtggtaccctggtagctcacgaatgagcaaacgccttgttcgcacctgccgcgctgcccttgcacaatgctgctgcctaattgtacattcgttcggctaccagggatgacggcgaaacggctcttccaagaacaaagaaacagtttcatcaatttacgcttcgtcttcgtctggtgaagacaacagagttgagacagctgcaggaagtattcacaaacacggcacttgatgtcaggcctcatttgtgtgcactaagcgctggcttgaaagctggatctgctcgtaaccgtgtggaataccatgatgacttttattcaagagacggcaaagtaccttcgaacggaggacgagacacctacaaaagacacagccaaatatttcacctctgtgctgggtctctaacgctgcatctgcgccaagtttgcgcgctgttatacgtaggtgattgtaggcgacatatttcagacaaccaattatgataccactcgtacttcggctgcgctttcctctcttacagtgaaattgaaggcttcgaaagttgggttccaatcgagctgtgcgaggtagctcctggccaaccctaccgtggatcggattgctcaacgcaggtgctacccaagctgccgtccaacctgaagcttgtagggacagtctccagccatttcttgaatcattgggctttgaaaatttccctttcttcaaagcatttctcgtctcggttgccgaggagatggaggatgttatggtgcgagtgctagctccaccctgcattcagaatgacatcaaattacaacacccgaaagtttgcgagacacaagtttgcctggccgtacactctgtcaaactggggtgttatcgtcgtctgccgcagattggccggttgtgattcatgtgtgactcgcgacgttgctcggagatttgttgagaatctgtgacaggaagctgaaacctatggcgtacgtgtacacaatcacgatcctgtcgtggtgataaacgatagtggcctcttgaaagctggctcacccattgccattgtttattggaaaccagcataaccgctcgcggggagcccagttgattgtcgtaatcacgactaaccaggataccatggagtatcgagtgatccagagagtgatgaataccgagcgaggcattcccagccagtgtgttacggcacgggtggtccggcgtacaaattcccaggcgctgacgagcatgtgcctcaagatcaatgccaaattaggtgtacacgatacgaagtttcttgaaggagcgctgcctctggtgcacgaagagcctacgattgcgatcagcacacatatctcctatccgaggttcaacaaaggcagagaccctgcgatctcgtttgtggtggtttcactggatcggcattcgtccgcgtatgctgcccgctggtcagttcaagatggatggacccagtgacttttcgcacttgcctcagatcctgtgagagtttttccttggaagctacgagcgcttgcggcgacagccaaaacacatcgtgtattatcgcgctggagtgccggcgtcttgtctttcagatgtggtcaatgccgagatgtgggcgttgcggatggcattccgtatgctcgatgcagattatgagccccgcgttacatttgtggtggccaataaacatcaccgtcttcgatgttctgctcgtgatggtgccagtcccagcgagagagccggcagtgcaacccccccccccccctggtaggaactattgttgactcaggaacgctcgttgacccgcagtgtttcgagttctaccttttttggaacaagtgtgccgactcagtatagagtgatggtggatgaaaatgactgatagagtcgaagaactacgccagctgcggtcggtcaatttctattgtgccgccgatttattacgcccagcttgcaccagagtatacgattgcgcccgtgatgcattgtctggttcgtcgtcgatttcttcctccaggcccacaatcccagaattgagtgagaaactccgaagtaccatctttttcctctaagcgagattggttaaagggcctcagggtgagcgaaagccagtacgaacgatagggcacttgcaacgtttgttgactgtgctcgcattatatcgttgagttttaagaaatatgtcatagtcatgctgttcctaacaaccttgctctggcgtaaataagcgaggtttctctgcacgaaggtacaagtgaccaagctgtggggcgctcaagtgagcgaatatcaagcaggagtgctgtaaccccgcttccttgcggccccaatcggcccaatgcgtctcatcctggccacgaaatgatggatcgataggaggtcctgtcgcctccgttgcgctaccaggcattttcaccatggagagtccatcgtcgtttgtttatgacgtttgcacgaacgtcagttgccttgggctctactggggtcgtgcttttgcttctgttaaagcaacctgggattactttccagcgtattatctttcagcaccacaacgttacttcgtgtagttggggctcgacgtccttgagctctagaatgcatccgctcgctcccaactgcaattcgtcgacatgaaagaagtgtgagagatccccataattcgggcagcgtccctccacctcatcgtgcaggctcttgtcgacgtcaccacgctggtatgactcatattgttgactcgctatgagccactcggtgatagcgtcactgcggactttcatgtgagcgactttcggtaaatggcggtggatgtgtgagtctcgatgccttgagcccgaagctgacccttcgcacagagctttcgtcgtatcgtcatcgtgccagcgcttgcagttcccgtaagttcttaaccaccgcatgagtacatccatggctgatggcgctcctggtgtcttattgtctctatcccattgagtgcttggcatgccactgtcgtgcgaatatacttgaaagaatacgacgagaaatttgcaaaaaataaacatttatgaacttactttaaaaaatcgaagaaggtttttgcaacgggatcagctcacttttgcagtaaagcaacacaaaaacacttccgaggcgaccaaagaatgatgggagaaccagcgtctcaaggcactacaaagcgtccttgggaatctgacaaccaatcagcagatgaaccaaggtcgatggacgtgttggcctcttggctcaagaccccgaggaactatcaacggtggcacaatagagtgaagaaggtcgcgcgtgaagtaatcatgaacgccatgaacgaagcccacctccagcgcactttaatcccgttgcctgccgaatttggcttctagggagaaaattcgcgcgagctagagcctcgctaggtgatagcagccaacaaccttcgcgtggtatggcgctcaatcactacgagcaacggaaacgggacgagctgtgccccggattcgtcgacatgatgcccgtgtttagcgcatctgctcaaacaaaccctgatggtggtgatggaggtcccagcaaggctgaacaaccgacgagatcgatgcgcaagagagcaggcgagacccaccaaattactcgctcttccaagcgccgtcagcccccacatgaagccacaaaagccatcgcccatgcgataactccgacaagacatatcaatggcgctcaaagcagcgtggggcatcgagctgtgcagagctcggcattctctgaccacgaagggcgccagtacacggagtggcaaatggtcgatccccttcaagtgaccccggcaatccaactgcgactggatgaatacgtgctcaaccatgccgcgcagcgcaattaagccatcctggcgtccgagggcacgaaaagagcctgcgaggtcgagacggcgcgataccgaatcgaggcggagcgacgcctgtgtgatattggcgtggtggtggcgacaggtttggatggcagatcacggcgtggacgctgacgagatggaaacaatgctgccgttgcaggagtgaagctagaggcttcggaacaatttccgccaattataattggtgtccttaacgtgacctcagtattggaaaagaggcaagctgtgtccattgtaatatttcgcatacgccatgtcatctttgaaataaataataaaagccacaacaacatttccgaagcatgaagcggagccggatggctcggaccttccagctccatggtgctgacttctagcgagtgtccggtgcgactgaccacgattggcgtcaaggcagcgtgcaggtggcccagagctcatggagggcagctcgtgtccaagcgggagtcgttcgagagtgccgctgacgccaagcactctaggttattacatgtgccttctggccagcgacgacttgaaagctgcctctgcgcctgcagcaggtctaacgtctttccagtcggatccacgccaaggccaaacgttttaacccctcaacgcccacacgttgtcgatacataagaaacatgttgtacgtactacatgctaaaacataggcggattagctgcataagtcaggccttcctacaaaatacacagggcttgggttcggcggaccagattacaggaaataaacgcatataaaccgtgcgagcgcgtgctagagtaaatacaaagcgatgtcgttgctacgtcaaatcgttttagcgtagaaagaaaccgctaccgaatcgacaacgatcccattacttgatatttatagcatgcattgtgtaagttgaccggtgatgtattacttgcaactaactgtgcacgttatagaggaccacaaggaagtggcgtagatactgtagcaagaacagttgtgccaaattgagcgtgaagcgtgttctagcgtagataccgacatcctcccgcatacgttacgagggaaaatggtgttttgagagagaattagatatataatagtaaatcgactggtatttagcctgcaacggaaaaggttcgaggggatatacaaagatcaggttgtgcatgtgtggacctctgtagtaaggtggtagaaatttgcgaaatcatgtggagttgatagtttcgaggctacaacgcgctaggtttatgaatgtattcacttgatgcgtcgtcgctttcgtgcaatataccgtacaagtcaccctgccttgcacttccttacaggtcattgcccagtttcttgataaaaaaagccactgacctctcatccaaatcccttatgatggtgtatctacaatattgcaatgctgtatctacccaatatatacaccatgtacatgctgtttgaacagcatgataaacgatttggcgaaatagtcatgtcgttgttgaacacagtcggtactcgaacttatacgacactatagtaatcctgagtgtgttgcgcgactttaacatgctgcacgataatcatgttgggcgggtactgtgaaataaaaaaacaggtaaaaaacacgatacgcagccgccgttgggcggggctttgctattcacggaggcaacttcgacggacggccgattccatgctggacaaatccgtactgaagaagccggacgcgggctctgacgtgttcggtgcctgtccatcaaggacgccgctgtataaatgcgagcaggacgcgacacaagaacttccccgtgaggtggctgggccagacggagtaggcgacggataacatcgcagctctgctatcggcgacagctcctggcttgaaatgtcaattctaacagtcaagtgttgtagtcttcactcgtgtgggttcgccaaagcctccgtcgccatccccagggcggctatttctggataggcgggtgttgcgagatcgccgatggtgggccgctctgcatatgatctggcgcgtcaggtgtggtatcaacgcgctatcagcatgcggtgcactttgagtgcgttgccatgcgctggggcttctacttaacggcgcgggtctgtgaggaagtgtttgtcggcgtgtcgttcaaggggagaagttcgctgtgggagaagcctgtctagaatggctgccttgcgtgaacattgcgggaattcgtattttgcgtgggactgcagatcggctaatgacgtccaaggacgtttgtgttctcacattgcggcgtcggttacgggatgttgctcactggtggtgtcaaggagaataccgtgttagcttcactgaactaagcgagcgtacggtagactcccgttggggtcgtatgcgggtcagatctggtgtttcggtcgctcttttcgggagagatgacatactttggataggacactagcgcgttcgctctcgtctgcggacttctgaccgtgggcccgcccgtctctcgcttcgctcggggggagccgccggctccaaagtcctcgactcggcccggcgctgtgtctggaaaaaacatcatgttgcggcgctcgcattcgctcgctcgcgcagacacgcccccgcctaatcggcgggtgttggcagtcggtgaacgcacggagtgagcctcgcgctcgcgctgctcgccctcggccatgatgtcgcctaccctcgggcgaacaggtggggcaaatcgcgatagatgtcttgaatgctgtattgaaaaggtcgacctgcactaccgagcagacccgcatacgacctcaaacagaatctaccccgagcgtacagcggactttgaacgccaattggacttgcttgctcagttattggtcgccatttccctagacttctttatcagggcacctttagctgcggatacaagccatcctgctggaccacccagcaatgatgtcccggcctgccgtagcccgcgttgttcacgcgtcccacgcgtcgccaagatgacgcctcgtcactatcttcagctgaataaatttgtgatcaagtaactctatttgccgacccccagcccgtatgtacacctacaagtgttagttgtctggtgtgtctttgggtcggcaagcggtggtgaacccaaccgagatatcattttagaacgatggtggctgctgcttctcggaggcgcggtgtcagcagcttagcccgacgtgtggactgcaggggtcagcaaaatgaggcagcagcggcactgaagtgggaacatttgcgtcaaatcgtggggctcggattatgggattctgctacgcctacgccatcacgccttctttccaccaggagcaaactggatgctcactaccggaatgtgtgagggctggtcgagtgtccatgtgtcacgcattctggcatgtttggcagctcaggagccccgacaattttctagtgtcggtgggaaatggttggtgtccagacagcaaggcttgacgacaacctgtttgccctgagactaccacaagtccgacgggggtgtttgggaacttatggattaacttttttgctgctacgtggagccgagctcagcacgctggtcgaaggcatctcgcggggggctaagggctgctgaggactcgggccgtgaaggcgctgcaactcctgctgcggaaatggatgaagcgccaccgcggtgaagatggcgccatttaccgaagacctgatctatttggaggtcggtgagacgcgcgatcgagcgcttcgacgttaaaacgctccatgtcggcggcatcacgtccatgaagcactcggttattggtgtcatagccagcacaagcgcagacgtacttcttcgctccttggccgagcattccttaagtagctcctcaaaacgctcgtcttcatccaaagacaccgaatagaagcatcacatcgcccagcgagagttgacagccatgcctttttttggagggtgtcgcgcttcacggcgggttgaacgacttgcgaaagtgaaccgccctttcactagccaaggccgcgcatcgacttccgtttcacacttattgcattgccatctaacgtataataccgaatagtatgccctaaggtattatagtaccctgcgaataaagtgccctatggtgaaggcatactattacaatagagtaccatcaaatagagtgtcatatattagagtgccgttccgaatagactgccgtcggtatcgacttccgcacgctatcctgcgctcacctgagaagtggtagacaattcccatccacccaagcttcgctcctccatcagcaccacgctttaccagctcattcgtcaacatgccagcaagacggaagagcgtggagctaagcatcaagaggcaagccatcgaatggattgtgagcgagggtggcggcgtcccgtcgagagcggaagcccattttcgtgcgttgggttggcgcatttcggccggcgggtttcgccagtggtggcacaaccgtgaccaaatcctggctggccaaggcaatcgtcgtcgaccggtgctgggtgaagccgaggacgtgcttgtggatctcatctacaaccgtcgcctcctgaaggagaaggttacgcgcgactggatcgccgctcaagcgcaccagctttttcgctccagcaggacggaggaggaacacgaagagcacccgatcggatttgccgcttctgatccatggattactgcgttcatgcagcgaaacggactcagccttcgccgccgcaccaatctcacgacgctcacggacgacgagctggtcagccgagctgtttccttcatgcatcgaagagtaggcgctttgatagtggtggcagataaaccacaaaatacatcttgctggcattgatggtataatcgtcttgggagattgtattgatgtagtcattatcaaatagaatgccctaacaaatagtatgccatcaaatagagtgccctactcggctccagagggcactcttcaagaatagtatgccgcatactaattagtattgtacgttattgtgcctttcacgtattttggcgggtgagctgttaattcaggcggaattagagtcataaaagggcgattaacgcttatttagtgctcattctgcctaagattgtgagcgcttcccctaacacccgcgatcagcatttgagagccaatcgacggagatacgagcagaatggcatggattggcgggtaggaagccgccaatcgctctgttttcgcctaacgcaggctggattagcttattccgtcttaactcggcctcaccatcgccgctcctaattcgaccacggagggacgacccggaattaacatgggaattagctaactcagggcataattaaggtcgataagggattagagtatgccagaattatcacggcagaataagtgaaaggcacaatacctctcggccagatttttgatgggttaacagaagatcccgctaagagggaacacattttgaggggaacacagaaaaacacataatgcggacttaatcggatgtcggcgccatttgggcacgtaaatgcttccaacttttaaggggcagtagaccgacagcgtcgacatgttctatcttgctatcggcgctggtgtgcatatagctagcgccctggtagtagctctgtttgaagctatttgtagagaaagagggtttgtagacatttttgtttggtacacggtaccattactaggaactggacctccccctctctcacaaatcaaacagagatggacgagcgaggatgaagggcgagctgcgcagcagcgcttgcgaaaggtaagagagcgctgcaggctcgatgacgaagcattagcactatgatactaaacagggcttttgtgtgcatggcaataggagtttgcgctagccaaggcgccaagctgagtggacggcgtgaacgccgagatctaccagaccgagacgctgcacgtggagcggctgacggtcaccctcgctgtcatcatgtctgtgctgaacgtcgggctcgatgatggactggcagtcactgggaccgctcatcttgacgtactcggcgtccgtcggcagtgacgtggagtacaggaggctgtagtcggagtcgtcaatgcagccctggaacgagtcaaggcttgacgcttgagtcaagcggcgcttgactcaagcgtcagcagtgtctgctgcgtggacgagcaggcgtcagggctggacgagctggaggcggcagccgagctggtggacccgcagagcgacaagcaggagctggtggaggccgtcatcaaggccaccaacgccggcggcgtctgcgccattatggtcagcaagaacctggaaggcacctcgagggagctggccgacgtgatcagcgcggtggacgcaacaaagacgtgcagccgctgcagcctaaggactttggccgcaagaccgacttcgtgaagcacgtgcggtgggtgctgtgctgagctggtgggagcaccaagggatggtgggaaagccgccccgctcttgaaccgattttcttttttttgaaaatcggttcacagagcacagtcaatcactcgaggctttgcgcctgtactcgcgagacaagaatgctagcttacactaggatagcacagtgttaagtttgagatagcgagctgtcgaacgacactagttgcatgtatgcttcacttaaccccccccgcgcactcatacgttgtatatgactacatgttatgaaaaagaacagcacgtctttttctacgtgaaatgcacaggtgtaggtgaaaatatgcacaaagaacgagtagtaactgcagagatggtgagttagactgattatttgattgcttacagattgctaacaggaaccgctctccccatcatgcgtacgagacagtgctacccctactatgccctgggtactccgatcagattagacaggatatgatacatgattgtgcatagtagctcgaaatgcaagatgaatctcgtccgatataccagggtatgtaaaagaagaggtaagctggaaagaatgaacaccgtagacactacattttgctatgtaagggttatattgcgcatgtaagtactaatatgcacccctcagagagaatgcagcctggtgaagtggcccaatccaataaaaccgagcaggacgtgcgctataataatgctaagacgccattagctcgcggttgggaagacgtgtcacttgattgctggctaggtacagcaggttttttgttttcaaggcatgcatagcctggtatgttaggatgcaatcataggatacttccagcataaacccgcccttgtgtttgatttttgttcaccatcaataaaaaggacactgcaagttgtagtatatacaccctgttgaaatttagctacccatccgagggcgtcttagacaacatgtgcgtctgtctgtgtcaaccagtttcccgcaggttatagaaatgtgtcgtacttacggaaggcaatagttagatcaaacacgcatacttttaacatgtagtatacagctttaacatggtgtatattgatcaaagccagggaccgaaaaacctcgcgagtgtggggggggttaatccgcaattagtttttttttcggcgttcaccgttttgggctctttttgttcccttcatagcgggatcttctgttaatagcagggctcgcaatcgggtacccatttcttgtacccgccctacccgcctcgggtatacccggtttcgggtcgggtacgggtacccgaagcaaacctcgggcggtgccacgggtacccgaagttggcgaaaatagtactaaatagtaatatttcttacttataccagctatatcatgctcctacgcagtcttcttttaacctccacaagtccttttcactcaggattgatttcgcgtagttcctacttaaatgtttaactttagatgttttaaaaccgtgtcgggagatgtaacagttgatccgtccgtacaaaaccttgagccctggctggcccgggtacaaccgtggcttgtgggcaggcaggtacgggtacccgacttcggcttggacggctacacgggcgggtacgggtacccgatcagcaccgtttgcgagccctggttaaccgcaacaagatttttttaaggataaacataaggaagaaatttgaggcaacccgtttgacctcatttttacacgtaagaagctatgacagatatggatagaaaggtctgtattcggtctaaatgagggtggggcctgtatgcgctagggttgtgatacctttgcgcagcagctcgaccaaaaaaggtcactcggagcatatcgctttttcgagtttatccttaagttaaggacaaaaatagattggccaatagtagaaacaagtgaattggtcggcgacccgtcgcgtccaatgcgaacccactgtcggccctctgtgaccgtacctaaccccaacacccgccaaatcaaggacaaaaacaaggaccaaaagttagaagcttacgctggtgttgtttttgaaagataagccatcttattggtacggagagaaagcctttgattccctcttttaatcctttgttatgcgtagtgtccaccattgtccataacggcaaaagctacagttgaaaattgtcattaataacatattacatttcatttttgtcctggattctaggacaaattccttaaaatgacttgagttcagtatagggcctcagccgttacaccactcgaacagttgttgttgtacatgacaccctcgtacttacctggatcttatttccttccatacaacccccaagtcacttttggtcctttttgctggttctaggacaaaaccctgctaactacggcgtacttaagtgagttttggtcctagatccaaggacaaaaagtgttgggctaagggcctgtttcatttgagaataactggaatatgaatagcgggagttattcctcccgcttaattacgataaaatgcgataatcttattggctaagaagttattcccaggaataagttatactgactttgaaagtcaggatagctattctgagcggaatagctacatggccggggcttcctcacctctccgtcgaggaccgccagactccgcaggccagccgatgctgacgctgctgggagcgtgtagagacttcgtggcgaggtgaggaagctccggcctatacaggggttggttgcgacagggtagagcagctttagtgctcctctagagcccgctcggggcctcaccacggcgcgcttggtgacgaatagcgagcagcgctcgaagcagtgttcgcgagttttttttgttaatctcgcgccagccaatgatttgcttccttccataacgcatattctttttcccagttattgtggggctttattctccacctgtttcgtttgaatagcgtagaattgttattccggctcggcgctattcccgacttattctcaaatgaaacaggccctaagtgcgtgtgtacaaatgctaagataattttaatcccagttaaggacaaaatcgccccaaaatcgaggccgccagatttgtttctgtccttattttaaggataaaatttgttggggttaatagatggccctttactggcgtttttcttactaagtaccaaatttaggatttggtccgcccaaattgctgcgccctccagtaagtgactttttactggaaaatcgccaaaatgcaccatgtattttcattaactaattgtgagccctaacgcaaatatcaattttgtactcgtatctctcgcacctagatgctctctagtgtgcggtggaggcggctcgggctgcgcgctgtgcccatgctgcgccagccgcgcgccggcctggccacgatctcgatccgcgacgaccgcgtggcgctttggacgcaggagctggagcggcagcaggcggcgctggcgcaggcgacggagcaggctcaggcgcgtggggagccgctggagctggctgtgcagtatccgggggagacgccgggctccttcgccttcagtggcgtggcgggcgtctccacgtccatcgacgtgctcaagcagatgcagcagctgggactgcccaagttccaggcgctggcggccaagatcgaggactccggggagctgctggacctgcgcgcgccgctgcagcgctccggagcactgaggctgctcgagtgcgtgcggtagtgcagtttatgtgggtttattagagggttttctgactgtgtgggtggctgggtgaacagtttctcaagtgacgagggcaagagcgtgttctggcactcgtcggcacacgtactcggacaggttggggcggttctgggttgttactggtgttcttgtaccgtggggttaattgtttctgtgtttttgctgttgtgcaggctctggaggagaaattccaagacaagatccgtcttacggacggcccggccttgagtgagggcggcttcttctacgagatgttcctgcaggacggactcacggtgtctgagacggactttgatgaacttgcgcgcaacatcaagaagattgtcaaggctcgacaaccgttcgagaggctgcaggtgacgcgcgagttcgctgatgaactgttcgcctactcggacttcaagcgagacatgctgcacaagatcccggagggtgaagccatctcgctctaccgttgcggcccgctgattgacctttgccgagggccccacgtccctcacactggtacgtgcattgtgcatgtttgaacttgtctgtttgctggactattacctgctctacacaagcagaagagagcgagggtgcagctgaaagtcgctgcgctctctagctgtcctttactgggtgctcttcccgcttggtcctatatcaactctgcctatcgaacgactctccactctcgtaatgagtgctggcgagctacacgtgggcaaacatgcatggaatcctgtagtattgagtaatgtcgttcatgcaactaacgttttcgcatgcatcttgttcaatgtacaggcatgctgtcttcgtttgaaatcacgagatgcggcgcgtcgcactgggaaggaaaggagctgctgcagcgtgtgtacgctatttcgttcccaaacaacgcacagctcaaggagtggcgtcatcttcaggaagaagcgaagaagcgagaccaccgactaatcggccgcgctcagcagctcttcatgttccaccccctcagccccggatcgtcgttcttcctgccccatggcacgcgtgtgttcaacacgctggccgacttcatccgcggagagtacaagcgccgtggttacgatgaggttatcagtcctctcatcttcaagaaggaactctgggaaacctcgggccacttgaaaaactaccacgacgacatgttcatggtttcgcaaggcatttctactggcgaggaaggttgcgaaggacacggccatgaccacgcgcacggtgaagaagagtacgatcagttcgggctgaagcctatgaactgccctggacattgtcttatgttccgcgaggcgaagaagtactcgtaccgagagctgcctgtgcgcctcgccgatttctcggccttgcaccgtaacgaagcgtctggcgcgcttacggggcttactcgcgttcgtcgattccaccaggatgatgcccatattttctgcacggctgcccaggtgcagtcggagatctcgcatgctctggacttcatcaagcacgtgtacggcatcttcgatttcaagtttaacatgcgtctctctactcgaccggagaagtacatgggagacctcgagctttgggatgacgctgaggaccagcttcgcctcgccctggaagatttcggtcagccctggactgtcaacgcaggcgacggtgcattctacggccccaaaatcgacatcgtggtgacggatgctctgaagcgccagcaccagtgcggaacgattcagctggacttccagttgccgatcaacttcgagctcgagtacgatggtgctgatggcgagtcgcacacgcccatcatcatccaccgcgccgtgctgggatcgatcgagcgtatgatggctatcttgatcgagcacacgggcggcaaatggccgctctggctcagtcctcgacaagtggccgtgctccccattgctgaggcacatcgcgagtacgctcacgaggtggctagcaagctgcagacggcgaccccccgtggtctgttcgtggacgtccaagacggcagcaagacgctcaacaagcgcgtacgtgaagctcaggttgccggctacaactacatcctggtcgtcggtgacaaggagcaggctgcgcaggaggtcaacattcgcacacgtgataaccaggtgcatggtgccaagccgctcgcagacttcatcgacgagatcaaggctgctattgatcgtctggaatagataggtgggctaagtgtacgtcagacagctagcacttcacagtagacaatagagccaactgatattacatgcaaccctttgtgttgtgccttaccgaattgacaaaggctcctcagggtagtcggtctcaggagcaatagagagctcgccgacgacgagttggttgagtgcgcgattgccatcccagccgccaaataggaagaggtgaggacctaccagcgtggaagtgtgaccgtagcggttagctactggaattccgtacgcagcgacacggtgccactccatgttctgtacatccaggactcgagcgtatgaagaccctccgcgtagctctcgttcgtgctgcttcttgcgttcgcgcttctttcggttctcctcgagttggttcgcgccattgttgctgcttgctagtcgctcctctcgatcctcaagtcgaacgagctcgcgaacttgcttgtcccccataaacagcggcgtgcgctccgtgccggaccacccacccagcatcactgctagctcttccccactgccagcccccgcaaggttcatcgactgaccgaaagttccaggaggatattcacccacgagtcgggggcgactccatgccatcgacgcgatgtcgaaaacatacacatccttgttgtacaccggcagcgcatcaggcatcacagtgtatccgccatacagaagcagcgacggtgaacccgcattgctggagagatccaccattgacaggttttggcgtggagttggcggcttacccgaacatttcggtcgacgccacgtgaaggtggccgagtcaaacaaccatagatcgttcatgctcttcttgccgtcccaaccaccgaacacgaacatcttctcgttgtccaccgacgctgctgcatggccgtagcgtccagcaggacaatcagtcgtccactggacttgcagccacgccatggcaccgaggtcgaagaagaacatatcgcggaaggcttcacctcgcgccccacgccccccgaagacgaacatacgctctccaccgttgagcaggagagctgagtgtccataacgcggggcaggcagcacaaccggcgggtccatttcgccttcatcgatctgctgacgtcgccgaggttgctcctttgggaagatgacctctgcccaagaggacgtccccagatccaagcggtggaggtcgttcaggtagacgaaacctccttcgctgccgaagtagtggccgccgaagatcaggaggtgggttcctgccagcacagcagaatggcctccacgagcgctaggcggtttaccttctagcgcgggcgtcgaccattgtagactcactcgactcgcgcgacttgataaagcgtcacttttgcgacgagagctgacggctcgttcctgcagaccttccttcatcggatcttcgcggattcagctcgatggcaagacagcagcagatcgaggcgaccgtccactccaagcgccgcactcaaaacttgtagggttgtagccaagaaataccagcaacaccaccaagtaacgttatattgcattaggttcaactatgcgcgacgttgcagaccgactccattgacctcgacaatcgcgcttgtatcttcctcgtgaagttgataagtggctccggttaatcgagctgcgatgtccagcgccgtctccaagtgcttcgaggtacggtgagcctttcctggcacacgcacgcgagacgtgccttcagctaacgccatgaagacgacaacattatccgcgaggtgctcgtcaacccacgcgccgctgtgaacgtactcgttcagtcttgagatcacctggtcggcaaaaatgcttgcggtggactcattcacgttaaccgtttggtcgactgagatgatcccgtcggttgcagtttccagcacgacaagggcagacaccgctgttctctcctttggcttcttgcccctgaaagacttcttcttctggtgggtggctgtagcggtggcctccacgacacactcctcttcaatggtaaactgctcattgctgtctccgccgctaaattccttgccaacagctttcttcaatgcactggcgtaatgatccgccaagttctcgttcgccgatgaaccgaacgcggtgactcgaatgaacgcacgacgaatagacgaagaccaatcggtcaagttgatagcttgaagtgtcttctcacatccaagaggatcgatggagacccgcacttgaccactagagccgccgccggggaaaaacatgcgcttgctcacttcgacttccaaagcaagaccgaatctggcgagcagcgaacgcagtggaacctgcataaagtctatcgtctggctgaacccaacatgcgtaccaccgcgtaaacttaactccgttgtagcatctcgaaatgccaacactggcagtgctccttgcatcataagggaaacgctgccacatgtgtgcgaggtggcgttgaagacaccacctctgttacccgcggccagaagagcagagcgtgcgtcaacgtgagatccgtcgagctcagcttagccccagtcaaaactccacctgttgatagggcagctacgagctcgatcgtgctcaggtgatggttgtgcagccctggaactgttcgatttgctcggatagagtggactcgcaccacgttgtgcgtcacagccgataatgccgtcgccactcgaagcaactgacctccaccttctccatccccaccattcagcactatggcaccttcgacctccttctggtcttgtattgtctcggccggtgcagcttacttctcctcagtcactgacacgcgatccccaagtcgaaagaacaatcttgcgtttttcgttgtagcccgcgccacctcaccttccgtgatcccatagcagctcgctagcgtctgcacgacagctgtaagatccttgggcccacacctcgcgcgcttcttctgtctccccgtgttgtacggatacatgaacggcgcgtcggtctaaatcatcagtcgatccatcggaatctgcggcaccatactcctcactgcaagcccgtgtggctccatgcacacgaaccctgtgaggccaatgtacaggcccatcttcagatacttccgcatctcgtcctctttgcccgtgaagcagtgcacgaccgtcgggggcagcgtcgcgctctccaggaaggggttcagcacctccaccagcgcctcgtgggcttctctctcgtgcacgaacagcggcatcttgagctcgcaggccagcgctacctgagccctgaaggccttcacctgggcgtctcgcgggctgtagtcgcggttgaagtccagtccgtactcgcctcgcccacaaccaccaccaggtccccgtccttgcccgtgatcagcgtccgcatctcgttgatagtcgagtgctcgtcgaagcccttggcatcgtgcggatgcaccccccacagtcgtgaatagcgccacgcccgacgcagccgcgtgctgtctcgccagctgcacggcgcggcggctctcgctcacgctggtgccggtgatcatcatcgcgtccacgccagcgtgcttggccctccgcagcacttgcggcaggtcacgacggaactggccgctcgtcaggttggccccgatgtccaccaacttgcgccccgtcgtcatcgctcctctgcgtgaattcgatactgaagatcgatcgatgcgcatcaaaaagtcaacccatttgtggcgtacaccaaacagaccatcactcacgttaggttaacagaccctaaacggcacaacaattagggtttaaatggctgcacctccccttcccagtcactaattgattgatcagatcagcatgtcggtgtcgctggaccagtcggcggacgccgagttcctccgcttcgtggcgcgcttctgcggcgtgaacctgggctccgccgcctcgggccgcctgcgcgtgcgtctgggcaagaccacggagctgtacgaggccacgaccatcgccaagtacctcgcgcgcttcgccgaccgcgagcacgagctgctgggccagacgcccttcgagcgcgcccaggtggccatgtggatcgacttcgcgcgcggcattcagcgctgccccccggcggcctcgcccgcgcactggcaggtgctggaggcctcgctgcagcagaaaacatacctggcggccaaccgcgtgacgctcgcggacgccgcgctctactacacgctgcacgcagcggtcagcggcttcacggaggcccagcgcgaccagtacgccaacctcgtgcgctggttcgaccaggtgcagcacacggcgggcgtgctcggctttcgcaacttcgacgtcgtcagcctcgagcgcaagcccatcgccttcacggcctagaaagagacggcgagagcagaagcaggagcaggagcgtgcagacggaggcagcggcggacgtggatagattcgctcccggcgacgcttaattctgcagtaataggagacgcgggcggcctgcgactttagatatgacgttggcgctggttttggtggattgttgttgctgaactgagtcagcaggaagactttgcagggcagatacggtgcttaatgcatgcgaaatatagctctattctcaatgacaaggcatctacagctctctctacttggtcgtcttccgcttcttgttggcggtctggcgctgctgcttctcgctgatcttcttggccagcgacttcttggcctcctcgcccttgctccagtactgaccgtcgcgctggcggaaactagccttcggagcgctgcctgccgcgtccagactgatgagcaccatgcggtctccgatcttcatgccgctacgacgagcagcggccagcgcctcgtcctcgctcgagaactcgacgtagccaaagcccttcaacttcttagtgtggttccagatcggcagtcggacgctggtgatcgttccgcacgaagccagcgcctcgcggatcgtgccttcctccacctcgtagggcagctgcttgatgaacaccgtgcggcatcccttcaccgccttcttggtggtgttttggttcttctccttcagcgccatctccacggcacgcggggcttcggctctacgaatggacaggtatctgttgaacaagtactgtccgtccagctttagcgccttcttcagtgccgcctcgtcatcaaacaccacgtgcgcgtagccacgaggcttgcccgagtcctgataccgcggcatgcgcacttcgcgcaccgtgccacaggacgagaagtgcgtcaccaagtcgccctcattggctcggtatgggatgccctccacgtagaccgtggcctccgtcttgcggtcgatctcctccttgagctcctcgtcctgcggctgctcctccttcgtctcctttttctccttcttctgcttcttctcctccttcacgggtacctcatcatcatcatcatcatcttcttcttcagatgaagaatccgctgcagcttctgcctgctcttcgctctgctccgactcggacgcagcctcctccgccttgggcgcggggcggaacatggcgttctccacctcgtcgtcctcgctgtcggagccactttcgctgctgctctcggccgatgaagacgaagacgaagcatccgaggcctcatccttcgccgtggtgtcagcgtcggcgtcgcggctgcgcttcttgctcttgaacaacgcgggcgccatcactcagtcgggctttgggcaatgacgcttgaagagcttcaaggcgcctgccccagtcaatatcggggtgtggtgattggttgaaaatcgggtctagattttaagcaaatagggggccatcagctggcgacgcacaaaagaagagcaaacagacaagagcaaaacacttgaccaccagcagcatgagctcggacgaggaggagggggtcaagctctacagcgcgctggagcgcaacaagaagcgccagatgttcggtgcgtctgctgcttgattccacagtgtatctacggacctagggtttatcgctctcagccgtggtctgtaagcctccactcaagcgctgacggattcacatgcttgctgacttttcattgctttcagtgtcactatcgtcctcatctgatgaagacggagacggcgacgagagcgttgacgacttcacgatcttgaagacgcccaccaagcggtgcaggcagagcgcgtcgcccggtaaagcgaagaacgggaagagcccggcgaaagcaggtgcgggctcacagtgcgacaatgaggagaggatggaggctgtgggtattgattgttactgctgctgctgctttgcagcgagagcgatcgatctggacagtgacgaggatgacgacgacctgtacacgcccagtgagcgtgaggccgagcgtctgcggaagctgaagatggagaaggagatcaggaagaagctcgagaacgaccaggtgttgaaccagacgcgagccatcttgaacaaggtttcgactaccaaaaacaatctggacgtgatttcgctcgactctgactcggatgacgaggatggtaccgaaagtccttccgaggttgaggtcgtcgcgcgtccgcctccgcaacctgtagtggacaaaggtccgcgtattaccctacacattcgctccaacggtggcgttgtggacgaagttggcattcacaaggtaaatggatgagaaggacaaacggtgctggtggctgtgtttaactcgttgtgtgcccactgtggcgtttacagaaggagacgtttgatcagctttacgcaagcttttgcgagctgcaaggtttgccacgggaagccgtgcagatggcgctggacggagagcccctgccgcttactggtactcctgaaagtgaagacttggattcgggcgacataatcgaagcaaaggtcgacttctcacagcagtgcgaggccaagaagaagacctatctgcgcttgcggctggtgatcttcggtaagcggtcagaaatcttcaagattgattcggtaagtttgcgagtatgaatccgcttcacccaataatcgctgaaatgctcacgggggatactgtttcgtgcagacggcgacagtcgagaaactacacgctagttactgcaagcgccacggcatttcgaatccgggcgatgtaattatgagtgtgcaagatcaggagctccgactggatgagcgcctggccttttacggcctcatagacctcgacgagatttctgtcaaagtcagcagtgttgtggcaagcccggcggccaagccccggactatagatgtacagctacgcttcgccgaaggtggcccgcaaactcaccaaattgtgccggtacgttgagttttcatgtggaggtcatgaggtagttttttctcatggccgttttgcaattacagagctccaaggttgaagtgctgatagcgaaaatcgcccaagagacagaatgcgaagcgtcaagtgtgtcactcatgatcgacggcgaggagatggaaggttcgcagtcctttcaggttcgtatgtctgcgctgttgaaacctacgtaagagtttgctcatttgcattgtttacttatcgcaggactacgatctggaaggcggcgagttgattgaggtcaagattgcatcttgacggacgtagccagcaaagtttttgagttgtctcgcgctagcttaactgtaaactatcacacgcattcctgttttgccgaaaacgttgtcgtccaccctaagcttccactggatccgcaaaagtaacggtgcgttgctccttgtgtttaactttcgacagcaacatcaccagcatcaacgccacaatatgagcagccagcaatcctccgtaccaaaccggcgcccagggcgtgtccaggtccaggaacgggtacggccagaaccctcgcgccactgtgccatgtacgatccacgcgaacaccgcatacaccgatggccagcccatgatcagtggcaaggcgtctctcgacacctggtgtctcgtggcaaagaagtccacctgcagtagcaccacattgactccatgttgacagtagctcactccattgaggatcttctcggggtggcccgtcttgacggcgtacgggtacagcacggcccacaccacggcgcaaatgagcagcgaggccgccagacacacgtctagcagcagctccaggtcgacccagtgcaggccgctgtctctaacgatcctcctggggcgagcaaaggcgctgtccgcgccgtcgtcgtcgccgtccaccagcgccgtgtagctcgccgtcctctcgtccaatcggcgctgcagctggcgccgtgtgcgccacgcggccccgcagaagtacgcgccttgcaggacgaagttccaggacgtgtagaacgccaggcagcggccccgggagcgccacacgtcgcagatttggatgagcacgaagaaggtcgcggcgccggctcggaaggccaacagggcgcgcagggaccagcagctgcgcggctgcagcagcgccgcggcgtcgctggacagcaggaggcggtcgacgcgcccggagcgccgcgtgaccagccagaaggacgtgcacagcgtcgccacgagctccgccgccacgatgagcgtctcccattcctcgcggccgagcggcatcgcttcctcgaggatgaatgatgggctgcgcgctgattggtcgaaaacttcaactggcgaaagcgcgggccttcccacgaattcattgcttccgtccgtcctgttattctatcgatagcatcccgttgatgaggcaagagggggggggggaatgctggcggaatcatgtatattgccctcgaggctgttgccattttgcaatctcccagcggcggacgacagtcagcagactgagcggcggatatggcgggtgttctgtacgtggcggtggtgtcgcgaatgatcggcatggcggacacagcgctccactggctcccgagttacctgcgcgggtcgagaagacgcagcatctacacgccgaaggaagactccaacgtcggcgcgtatgctggggagtcgacctcgcgccatgcgacggccacaccgttcggtcgcgtggatgctgccacgcctcgagtgagcaagagaaacgctgggatcaagatcgcgctgtgagagtgaagcgggcttggatgtcgtgttggataaacgtgagttctactcaacaagagaaacatttctgcatgacttgatcttcccgcctacgaagtacttagttgacaactaggaacgacgacgtccacttccgcagtacagctacaagcttggtcgcttccagcacattcttcgagttgccgagcagcttgagcacttcattgcaccgatgggcgagaactgcaccactttcactctcctgtccagttgcgacctggcggaagaaccccacgcaagctccacacttgccttcccagtattcggggtctggatcgagtctctccagtacgtcgaaagctttagcggcgtaaaagtagtgctgagccttgtagcagtcgttggcgatctgcttgagtagagtgaacgcagccacggagttctccatcttgagataaacttcccacgcctgcgcagctcggccactgtggatgtagcaacgcgacagccagccacaaaacaccagttgagaacgcaattcagcgctttgcactcgaagcagcacttcctcagcttcaccatacgcgcccgtagctgccagcgctataccgtagttccagttgaacgcgtcgtcggtactcaggtacgtggagattgagctgaggtacacgtttgcatcactaaactccttgcgcagcatgaagtacgacgccatgcactgccggcctggaattgtgtcgcaatcgtcgggcgatgaccccgcagcatggaagtacttctcggcgaggaaaatgtgctccttggagtgtgtttgttcaccgacaaccgcgtgcagcacaccctttatcgcacgctccggagtggtccgtggttcaagatcctccaccaaggcaaacgccttgtggtattcgcggcgcttgagatgaagaagcaccaggttcaattgagcttcttcgaggtgacccaccatagggctcagcacccgctcagccgctgctccttgcttctcaatcccgttcgcttcacgatcagatgctcggaagatggcaaggttgtgctgcataacgtccgtcatggccgattcggaatgctttgagcttgtcgtcaatgaatgagacgactcgagcgctccctgagtgcacgggtggttgggatatcgccgggcgtagtcgtcgagaatgggctttgcctcacgtgtgctgtatagccgaaagttgcagctcgccttcaagttggtggcgaagaagctgtctgggtggccgatcaagtacacagccagcagctccggagcaacatcgtcgtagcccagcttgaagtagcacagtgcgagatacacatgaagagccgagccgccttcttgactccccttgcttgactcggagagcagtctcttgtaaatctccgctgcctcctggaaattgagctgggcaaagctggtagccgccaacgccagctgatcctcgactgagtcccgcgagagttgttgatagcgatccagtagcgcctgctcgccatgttgccgctgatgcgcgaggaggaacagaagccgattgcacaaagcactccgtgaactgctgagcgccgcgtgctctgcgtcctcgtagttctgtaggtaatacaagcagcacgcgcgactcagccgccaactcttgaggtcagttgcactcgcatcgccagtcgaagcagcgtcgattagctgctcgaagtgagatagcgcctcgccgaagtccccactgtggaaatggcagtacgcgacccaccaagtgttcacgcgccacgagcccagatcattgtcgtctggagctcccttcttcctgcgggctcgatcttgctcgctgtcctcacgcctcaagactcgcagtagcgtcaatgccccaacgaagtctctcctgtccaggtacgtatccagctcaaagactttatcgcgtgcgggcttcgacctcagctgcaccttgtcctgggacaccctgctgctggccgctgtctgcttcggctgccttgccacaaacatgttaatgcgcgtacttgcgtgaaatgagcgtgactgctggaaggtgtcaggagtcgctgtatctacattctaagcttaattcgttagttccctttcgtttcgtcactcgcgtcgtcctgctccgtcttgcgctcttggtctcctgaaaccgaccggtaaaactgcgactgggacagcgtagttggcctgctcccgccagcctgcgcggagcgagctccgtagtggttgaacaacggcggtaagccttgcggggtgtcaccactcttggtctcctcgtccacggtttgcgactgatcgcctggcgagggctcggactgttcgttggacgcctgcgagtcccggcggctgcggattcgtcctgagtctaccgagtcctgagattggcttgaccctgagaggttcaacgcgtggtccgcggctgcacgaatttgcacagtcacttggctttcctgctcagtcagctcgctcacgaccttggagtaattctgctgcgcctcggctctctttcgctgcaatgccaccagctcagccgtcaactgctgctgcctctctgtctccactaggttcttcttcgagggtggggtcctgcaacaatgcaacaagtcataccagtagcgatttttcagtattgcatgcatagccaaaggtgtagcagcttggaaacgtacgtcagaggtcgaccttcgcgagacccataagctaaatcgtcttgagtgctctggagtttacgcttcagtacagagagctgaagaaaagagtttgttagataatcgagcataccaacgtaaacagcaattatgcgagtacacgcacctttgtctccagctccacaacggagcgcacttggtgaggagccttcgggtccgctagtacctggtgaatgactcgtttgagctggtcacgctcctgtcgtaattccgacagctccttcttcgagatctcgtcctgtttggcagcttcagctttggccttcttgatctcagctgcagcttcagccttaattttcgccagctcctcttcgtgcttctttttcatcgcctcgttctctttgcgaagagattccagttcctgctccgccttttccagcttttccgccttgttctgcagctcgagctctttatccagcatgatcgtgccgtacttccttttgagctctgcaagcttgctgtcaggcgctggcacatcagggcgacgacgtctcttaccagcagcagaagatggtacttgcgagccgctgtttggggcagactgggtggcgggggtgcttcctggctcactcattggctggctagcatcgtcgtcattcgactgctggctatttgtcacccgccggaccttcttcacgggtcgagggcgaggcggtgaaagtaccactttggtagggctctgcgtacactgcgtctcctcgtgagtgcgcttgcgcgtacgatccgccacggacatctcgtcggcactcatccgcgcgtggagctcttcattctgctgggtcaacccgctaggcctgcaagacagcaaaaatcgttagtcggctacaacagcagcataacttcaagcagatgctccaaacgaacagtatctcgagtctgtacgcgatctccttgacttctaggtaatagataaacaaaatagctacgtgtcaatcccccctcccaatccattggaccccgttagggcacaagtgcttcgcattcgccaccacacaaacctttagcgttgggggctgtgaggtgaatcaccccgcccttcttcagcgtccccgtccttctgtacccaatctttacgcggtccacccaagtaccatagcgactacttcgcagccatccaaacgcagataatccgccgatcccttgcgtcaatatttacattcccagcagtctccagtcgcaaacgaatcaacctacctctggtcctcgatctcaacgatgggctccccacggctatccttgcccttcactttgatgatgcagtgcttcatacatggagagggccaacatatagtcaggcacaagtcgactgaatgaacgcggagagcgttgaggccgacttaccaggccgctgataaagtccttggggatgtggagatcgcatcggttggccacgcggccgacgcagtgcctggagcgggacaggtcgaagtggtccggcagcgacgacctgtggccccttgagagcagtacgagccgcccccacgggagcagcctcggcggagaaggtgacgacgacatggcgagcttcgtgcggttcgcgccggtattcaaaactcagcctgtgggttgaaagtgtgctgtacacaaacccacttggagaacgttctacatttagtcgatgcggattggttgataatgtctagtttcagattggtcacttgcatccggtattttgcccaatcgctgcaatctcggtaactcggctagagcacctgtagctggccatgacgaccgcgcaccgcccgacctggcacgccgccgtggggcagtcgaacgaaggaggatggcacgcaggaggtgcgcacgagctctccgcacatgcagtaccaatttttatcgctttatgccgctgtttgacgtctaacacgcccgttaaatgttgactgtgtgatgctgcaggcaaactgagcgaacagacctcggcgcgtgacctgccggcccacaagcgccttaaaatgcggtacggctggtcggcattgatgggtggtgatgtacatcaatagaagtgcttagttcaacgtggtttcctttctgaatttcagccaggttggccagggcactgccaatgaggtggagctgctggatctgcgcgaggaactcgagcgcaaggaggagaagcacgagcaggagaaagggcgcaagaaggacactgctcaaggtgtggttttgcggtgtgtagcgttgaggccaggaaccttggactgaagcagcttttgttgaattgtttggtggaacagacaagctgcggcgactggaggagaacaagaaaattctgctgctcggcgacgcagaagctgacgagcgcgagtcgcagctgaagaaggtcgcgagcaaatatgacgatgcagacgacggagctgactccgaggattcaagcgattccgatagtgataggtgcgtcttgtagactgtctcgctgttgctcgtgctttattcatgctttattttgtgatggcttcttacaagtgacgacgaggatgaagaggctgagttgatgcgggagctggagaaaatcaagcaagaacgtgaagaggaacggctacgcaaggaggaagaggagcggaaggctgcagagcagcagtcacgtgaggagatcctccaaggcaatccgctgacgcagcagcaagcggcaggtagcgccaagatgaagcgccggtggaatgacgacgtggtcttcaagaaccagtcccggaacgagccggaggtcaagaagcgcttcatcaacgacacgatccgcaacgacttccaccgccgcttcctgaacaagtacatccagtagtctcctgggttttcaggagcaatgaaggagcgttgtaaggaatcatatacttttcatggattatccccgagaccgactcgccgagtcttcgatggcgtgacgcatacgctaacgtactttgacgatcatgccgcccacgaacttgtggacagtcacgtcctcgccagcatcattcgttgtctgggccttgacgtactcgccatcctgctggaggccgctcgggaacttgagcatgcagttcccaatggggttcccgttctcgaacctgccgacgtaggagccgccatccttgaacacccacttcccgttcgtgatggtgttgtctgcccattcacccacgaacaggctcttgtccacagcgaactcgtacgtgcccttgcccgagcggatgccgctttcgaacctcccgctgaagatgtctccgttcgcgtacatgtacgagccttcgcccgtcatcttgtcagctttccactcgccatggtacgcgtctccattggcgaacgtcatcttcccgagcccgttcttgccgccgttcacgtacgtcccctcgaacgtggcgagcaccgacactagcaaaacacaaagcgttagtcaacatacaacaccacacagacgacagcttcgggcgccttacattctccctctgcgttgcgctggttccacgtgtatttcccctctccgtgtttcagccggtccgggccgatggtgccttcgaacgtgtccccattggcgtaggtgattttcacttcgccctcgcgacgcaggtacttggcctcttccggacggtcgtccacatagctcaccgagtattcctgcgccatcattatcagtaagcaaccataccatttgcctgaacccatttgcatgtatcatatcataccgcgtcctcgctcattgcctgcctggtcgatggaagtcctcaactcaaagtgcacttctagcaatgcgtcgtttcgtgtcccgacggattcgcgcaacgtgattggacgatcgagcagcttgatgaacggcgcggtgaaagtctcacatcgagttgaccatcatgttgctgcgcgtgtgtcgccgtccgctgcgcgccccgctactccagcgcgggaatctgctggcgagcggcctctcgacttcgagcgcaggtgacagtgacgaggacagtgagaaggctgcagcgccggcgtctccgcacaagtacgacaacgtgcgcaagctcatcgtggggctgggcaacccgggcgacaagttcaccaacaccaggtgcgaccggcgtgactttactgctgctgcagttgaggagcagtgtatttattgaggagaatgttgccgtgtgctgcttgttggattgtgtgtggggtaggcacaacattggtttcgtggcggtgaagcacttcatggacacctacgcttctcaagtcacggtgcgtgcagctttgctctgtccgaagtcgggctactatccgctgtttgcattgataaaagcagttgcgttgacttggggtacagtagcgtgtattgactgttctgtggtctgccttgtgcagggaaagcagctcaagctggaacatgaagcgggcaaccacggtgatgtggcgcggttccgtgtggcgttccagcagaatgtggcagataagggctacgtctacccagtggacgacctggtgaaccgctcatcgaagcgagccaaggagagaactctgaaggagggcgtcccgcacgacgaggtgaacgtcgcactgctgctgcccacgacgtacatgaactgctctggcaccgccgtgagagccttcatgcagtcgcaccgttggcgcctgaagaagaacccgctggcgctgaaccgacaagacgagctgctcgtggtcacggacgacgtggcgctgccgttcggcgagtgccgcttcaaggcgaagggcggtcccggcggccagaacggcgtgcgcgacatcatcaagtgcgtgggcaccgagcgcttcgctcgactccgcattggcgttggcgcgcctcactggttcgtcggaggcaacagcggcgcgccgtcgggcaccgcgatggacaagttcgtgctcgggcggttcaacggcgacgagcaggaggccatgccggacttgctgcgctacacgaacgagctgctgcggctgtatctgcaccgaggcgtggcccaggccaccacgtacgccaacagcatggacttgccgcgatacttgaagcagtacggcgcgtcacagcgggcgcgtcgacagtagatctgccgttaaatagacttgggatttgtatgcccactagccctagtcgccgaagtaaattggcgtcaactgcgagacgatcgccattttgtcatttgagccctccgcttcgtgtatcatcggtctggcatcatggcgacgccccctgtacccgtgcaggtctcccagaaggacctccctcgcgtgctcgccgtgctggtgctcggctacgcagccgtctcgtggctggtgcttcgtatggacgactacttcgccgcggacgagcagggcgagagcttcagcttcccgtgcgtgctctcgtgatgaattggtatcggcaatgggaggagaggcagacgcactgatatgttgtggttattgctggatacaggaaggtaggggctttcgtcgccatctacacgacgctgatggcgatctcccgcttctacgagcacggtacggtggactggggcgagaatgggaggaatggctgcgtactcatggagttattcttcacaggaacctacgtcctctatgagatgctgtgggcgtgcaatgtgtcactggtgctcgtggtcatggcgctgtacttctccaagccgttcctagtcggcgtggcggtgagtacctgttgacttgctcatttcgaatgaagggagattgctaattagaattggtgttgtgtgttggctttagatggtgacggtgtcgggcgatcagctgctgtggtacatcgacactctgtcgttcattctcaacggcaagtttatcacgggcgccatgaagtacctcacgtaccctgaaaaccgctcgttctccaagacattcttcgcgacccatcacctctggttcctgcctgtgtgcctttacgtacgtgcaatcattgcagaagcaatccattctccatcttaccacgctgaatgcccttctatcgtgtctgcaaacagatcactactggccacggcggcatgcacggttcgagcttcgtgggctcgatcattttgaccacgttcttggctgcgtactgccgtgctttcacgcccttcgaagtgcgtgtgcccggcagcgaccacgtcatttaccttaacgtgaacggcggctacgagttctggaaggacatcaagatcccgctgctccacctactcgaccaccaacacccagcgctgtacctaccgtacctggcaatcgtcggaaacctcgtcgccaatgggttccctcacatgctggtgctaggtgttgctctcggacttcagtttaatcccttgcttgaggggatcacgcactgatgaaatacagagtaacatgtccagtgctctcacgaatcgtcctgtctgtattacttcacaactcaaagggctgatgagtgtcttcctacagctctttaggcatcggacactggaacgggaggcgaagggaggggtggtgtgcttgtactggctgcagggaggtcgatcaggaagagaaccccggcaagctgtcccccgaaggtaaagtctccagtcgtggttttgaggaaattgcagtcaagttggttgaaggacgtgcggccgccgctgcgtgtggatggagcaaacagtgtcgggtggtgcattggggagagcggcgaccgaggggatccaggtggggagaaggtgcccgatccggagaacgaagcaaatcgcccgcttgaggaccgcgacatggcgggctgcggtgacggcgcatcgacgttggtgcgacgcaacgtgccggcgaagttgagattgtactgcttgcggtagtcttggaactcgaggtcggtcttcccaatcagtagctcgacgtactcgatcggctcgagctggaagagcttcttcatgacgaagatcaacagtgctgactcttccccgacgtcgtcctcaggtgcggggccactcgttggcacgtccggaagcatttttctagaaagcaatgcaaatcgtggccactgttgggcgtatcgtttcgctgtcttgtcgacaatctgaagtgaagacacaagtgaacacacaagttagctcacgaatgatagcgtgaactgttgcaagactcacattgcgcttttccagtgaaagcgtttgaagatgcagctgtaacatcgcttgagtcacgctgcggatctgatcaatgtgctcgtcgtcgtgaatagtttttaagatcgccaagcctggcttgtagtaatcgaccgctcggtaaatctccccgagatctcgcgacaagctcgccagttgcaggtacgacttcatcatgtcctcgtgatcggctggaaggacttccttacgcaaacccagacctatgagggcgatcccatacgcagcttctgctgcttgaaccccgctcacttgtttgcgtagattagctagcatgtagcagcactctgctgcaaagtccttgtacagcgggacgtcgtccacaggatcctggaagtgcttttcgtagacagagaaggcgtcttccagtacccccatgatggcttcaccgtccgttgggttggctgtgcacatcagcatcccttgttggcgtcgaatatctgcatacagcagactggtcttaccaaagcaatctcgaaccagtgctacacaactctgcaggatctccacagcttgttctggttctcccagatcaccaaggatctctgtcatggtcatgtacgtatcacaaagcagagggtgggaaggaccgagatgccgctgaataggctccaaagccctggcaaagtattcctgggctcctgctaagtctccagcggcatgcttcaacttcatcaaaaccgtgtatgctcgagtcagctcggcatgattacttggtgagtcttcaatcgccagtgttgctagctgcttagcttggtcacgcagattcatcgctagtgaaatgttggcagcgcacgtaagcaagtgacaaagcgacaggttgcgttcgtcgcttggtgacgtttccagaatggagatgtgaaacaggatacttgataaggcactactgaactctctggcagcgacataaacatcagagctctccagaactcgttcgcagtcagtcgtagtccgagccaacagcaccgtagttgggcttatgcactgcatatactctagtgcaagtggctccgctcctttgaagttgtagttcatgtggtcgctgaagtaaacccccgtctggaattgaagcgcatggaataactgcggcaagtgaaataaatcctcactaatgatagtatccaggttcaacgcatcacgtgaaagtccgaacttggcttgcacttgtggcagaatccgctcctcccaaaatgttttcgagtcaggagacgagatgccgagcacaaggttgaagaactcaactgttacttgggaagcctcctcttgaagagccaacttcgccagagctcgagctgtggcagggtcaatgttgcggtgaatgtcgtcatctgacgactttgcctgcctcaagattgctgcagttgcgtcagggagaatcgctcgcagtgacgctctgagttcaattttgcaggctctagccaccatctccacaagcaaaactcgacgaacgtgcttcagggacgcgagctcgtagcaagaagcaaggtaccgcacgttgatgccttctccatgtaatgctcgagttagtgagcggctgtcaaatacctgaaccgctgcgttctccaagtcagctacaaattccgggatgacgatcgtgtgcaaacactcacgagcgcttatagcagattgctggagcagttgggcctctagcttggacttgtctgacgcatttttattcgcaagaggctcgtgatcgaccgaaacatgagtgttggagtgcaagggcagactattcccgtacatccgaacaaactctggcctcattttgtatagcaagacctcgcgggcaatttcgtcgggttcttcgcttgatacgtcggctgggaagagatccgaaatgttctgcagctcaaatccggctgcaccatttcgagtttccgtagtaaatccagcgcaaatggggagaaacgcaggagcgggttggccagtttgcgaattaagcttcttgtcatcgtctccaaaaccctcaagactatccgtcaaaagcccaaggttatcaaacacgattttgagctggtcgcgtagttggttgaggtgcttcggattcgcttgtcctgccaaattctgtcgcgtgctctttacacttgagctcgtagatgcgatcacaaatgcccgaaacccgaggtggtccaccgtacactgaaggggcacttgcagcgcgatatctcgcaaacctggctgcgagtcatctccgagatcctccactgcactgtgaattgcacgtgcagcacggatttgatgacctaccattctgtgaaatatcgccattgaagttgaatattgcctcttttcctgcgatgaaccactcggcgggttacttgagcataggtaaactaatagcccatcgcgttcgtacttgaacagcatttcgcacaaggcaccgtactgttgaactccgtcagttgcaaaaatctcatcatcatcgagagtttgtggtcgcaaggtcttctcagaatcctccaacaccatttcagctacaatttcgctcacgagcgcttcagcagcctggcgaaactcggcgaggaaagctgatacttccaatccgacagcgagcttatcgtcggtcgggtctgtaggctgcagcgcatgatacctttgattccagtccgctctctggtgacacaacaagtgcttggacgctgaaacacgagtactagccttgatggatacgctgtcgtctcgctgctccggcggcctacgattttctgtagcgatctggttgtttgaacgctcagctttcacgcgagccattacttcttgagcgcaatagtagctctgaagccacgtaagcagccgcgttcgagttatgacaccatgacgaccaagatcaagctgttgctgcatcagcgcaagctcggaatcctgcccctcccatccaatgtgaacacggcaaaaacaaaatacgagtgtgatgtaaggtctacttcagacacgtcattcgccataatctggtaacgaaaagtagttgtaaaaggatatagtttgcagtagtccgtggagcttccccgcttcaattttcccagagtttcgatgatcaatctgaggggcaatcatcgtcacattcgttaactgttctcaaagcttcagagatagcatattgtacctccttgaaggcttctgcagcccggcgaatcttttccgtcacgctacaaacatgaaaatccgagttagactttgaccaggatgacgccaattgatcacacatacactggagagacgtgcgcatcggcaggaaggcacaacctcgactacacgagcacagcatcatgacttagttttcaacacgatagctctcgcgcttagagaatatcccctcacggtaagtgtgtatttccactcggccagctccttctccgacgagcaggcaaacgtcacgaccttcgacgactacacacacggtcagaatgtcaagttactcgcgacgaacacggccatttgtaccacgaagcatgcatcgccaaccttctcgatcgattccaactggaaagcaaacttgcggctcacttttttctgcataaccaattgattatttgtgagcattcgagcagtttgtgtggtagctcactccagcacacacctcgtctgccagcgcaaacttgtactccagtagctcgtagcagttgctctggcgcgagctgccgagtgagaaaacctgctgctccacggccatggggaagcacttcagcactgtgccgtcgaggtgtacccatttctcggtccatttcgggccgaagaacccggagccgagctgcgcacccacaagttttcagtgctgatctgtgtatcgatgcatgcaccagggccaggttaccttgtgcagcttgccggacttggcctccatcgtcggcatcagggatcttggacggcaacagaaccgttgtgctgcattgcgtccctctggacttcaactatcatgtttgacaggatttccgaaatattttcacatattcggtgtggtccaccgcacgcgtacttttgcatcgctaaaatgcgctgtggaaatccggcgctgccataggctcaattaccgtaccctcaaaacacctcctgttcagcatattaatcaaaaacatacttcgctaaaggtcactatatatgttgtgaacaatttccgctctccacgacctaccgtacatcatagctttacttcttccgaacgttgaacactttgtgtagccatccactcgaccacacatcaatccggatcattcggcaaattggcggctatcaagtagaccagcagcactacaccgcaggcagcatgagcgcggaggctggcgtgacgtggagcaaggaggaggtgatcaaggccttcgaggacgcgggcaacctcaagttcctggagcacatcaacctgtccaacacggccaagtgctcggaggacgcgcccgcgtacatcttctacatgcgcggcctgcagtgctcgcgcgacccgcgactggcctaccacttctgggccaacttcgccggccgccaccagttccacctgttcacgggccagcctaaggacgagtgcatcaacgccgccatctacctgtacgtgcccgacctggacgacatcgagaagagcctcgcggccgtggccgacgagctcaagggcaccaagttcgccttcgagcgcatcaaccgcggcgccgagaccacgcgcgagtacccgcaggagaagtggcacgagatgttcgacacgaccaagtacgaccacctcaaggtgaacgacccgtacggcaacgagctgcgtctgaacgtgacgccgcgcaactacgagtccatcaacaagtcgctaggcaagacgctgcccgtgaccaacgacgtggagggtgtggctcagggcttccccttcctggtgtacccgtgccgtccgggcatcgctcagggcatctcccgcttctttgagcactacctggaggccaagaccgtggtgacgaagaaggagggcaacgaggagggtctctaccgcacgactgtgttctgcggcccgctacaggctattgtcttcgacgaacaggagtcccagcgcgacagcaagggcgagtacgacggccaccacgtgtgcatccacatcgaccgcttcaaggagtgctacgacaaggccttcaacgaccagatgaactggaacaacgtgctgttcttcgaccgctgcgacacgtggttcgaggccaaccgcgaccagcagtaccgcatcctgcacctggtggatcccgtggacaagaagttcctcatgtcgttcgagatggagatccgcacggcgcagcacttccgctacctgatccaccgcagcgatgtgacccccgaggaggaggaggccaacgaggtcctccgcaagaagaacctgtagacagatattgctgcagatagcgtagtgcgttcgattggcacggcgcagcactcgactgacattctggtgtgctccgtcgattcaaagtggtaaaaacagagtggcgatgtgtccgcgggcaagattccgtacagtatttttgcgttgcgcacataagctatgtcaaccacaccacagtcccaacagcgaccatcactccgtgtctagacaagacaagtatggcgggctcgccggacgcgtcgtcgccgttgggggcgctgcaagcgctgcgccagcacctgatcgagtgcaagcccgtggacgtggacggcgaagacctggtgttccgcgacgcaggcggcgccgagctgcggcgcctgcccaagcacagcgccacggcctaccactccaagaagctggacaagagctacgacctgctggccgtgtacacgtgcttcaagcacgaggcgctgagcttcagcgactatgtactcaagtgccgcgaggagacggcggccatggtgtccacggtggacaagaaggagctggtggcctacctcaagggggacatcgaggccagcgcgcagatcctggacgccagcggcaagcccacggaggccaagagggagcgcaagcctaccggttctacctctagttctgcctccaaaaagagggagacggaggacgaggcccgcgcttcagccaagaagaggaagctcgagggagcgcgccaccaccgagacggccacaagcacggcgagagccataagacgcccgaggagctccaggccgaggcccagatgaagaggataacggacaaggagtgcgtcaacaggaccaggaccaccgtgctggacgcgcacaagaccaagtttgacaacgtggtcaagacgctcgagttggtgaacgctgagaccaaggagaagatcgagaaggccagcaaggcctcggcgctgctggccaccaccacggccaggaaggagcagttgccgctgcatcggctggtcaaggagaagatactgggcacgccgattattgtggtgcccgctggcttctccgatttgttcacgatgctcaatgccagggacttcctggaggacggcgtgtatgtttccaacatgcagaagaaggcggccggacaccgcaagcagcagtcgatgatgatcacccatgaggaggacggacacgtgtacacgttcaaggtcgtcgacactgtgagtcgattccgagacaaggactggtgcgttgagcagagtggttagtgtttttggagggatggattgcttattgatgggttttgtgtctaattgatgcaggcgctcggtggtcggcgtcattgtctcgggacaatcatggcagtttaagggctggaagtggaaattcccgctcgaagtgttcaagaaaggtgtgttttcacgtttggtgctagcttggtgtaacgttggtggtgcatgatctgattctagagtgcgctggtgtgttgcagtgtgcggagttcacatctacaaccaaggctcccagctgaacccagaaatcaagcagtgggacgtgaaggtgctcatggtaagttgcaccttatcagtgataataatgttaaccgttacagctaatgtcacacgtattgctgcgtggcagatccaccccgacaaaaggcatttggacaaggtggcagccaaggagttctggcgctacttgttcgctttcatcaagctaaagctgcaataaggagcgcatgcatgccaagctatcatttgcctttccagtcgaggccttctttagcacatcggtgctaataggacatgatgccgcaaattgccgttgttcgctgacgcagggaggtacatgcactgccatgcaggctaacagcaacaagcgagagggcccttgcgctggaagttcagtgtactgtgcggtaactctatatacactgagattggcaaatatggtgtatcgaagggatagttgaattggtcgtctgggatcatttgcatgcaccaacacccaagcttgattcacgtgtgcatccacactttcgtcgggcgggctcgccattctgtttgtccagtctgtccgtgcattcgctaacggcattttgagcggctgtcttgtatttttaggggacgatcaatgcgcaagaggacttcgggcagccctagcatcaagaaggtatgcaaatgaacatcaccaccgctcccgatggtgccaagtcttcgttgccgcctggaaaggctccgatgcatcctgcagcattgaagcgcttccccacgctacggaagaactcgttcctgtaccagctccaagaccagattcaaatccatcgagagagtgaaccgcagcgtcagcggcagaaagaggtgaaggagatttaccgcatcttgcaacgcgccccggaggctcgtgaggcgcatgagatcgacaccctgtacgactgggtgctcaagaacgggagcacgaacaagatcttccaaggcgcacaagagatcatttgcaagacgatttgtcgcgagatgacgctgttggaactgccggctaaaggcgccgtgtgctaccaaggtgactacggcgacacgttctacgtcattatctcaggctcagtgtcgcttttcatcaacgcaaagccaaaacccagactcatcctcgaggagaacaacaacaacaattccaagtcgtattcgaccgacgaagaagaggtgaagctgcaaccggatcaatacgggatcttcataaagcacatcactgacggcggcactttcggcgagttggcagtcatggaccccacggcacgacggtcgtgcaccattatctgcgacgagcccacgtctttcatctgcttgaagcgaggagcgtaccagcggctgatacgtatcactaactcttcgcagcttgacttcacgcaaatcgagttcttggagaccttgcacttcttcgacgggtggcctcacggcgagctcacgcggctgtctaatcgcctgcgccaagtgcactacccagctgacagctaccttactcgcatcggtgctgacgccaacgtggtcttcttcatctacgcgggtatggtccaggaaaccgtgccgatcatccaactgcttaatgagaacggcagcgtccagcgctgcgcagagcttgaaagcaatttggcgaggcgaagagtgcagggactgggaggaaagaggataagttcgcaacaacgacgtcggacagaactcgagctgagtttgtaccaagaccatgacatctgcggcgagtaccccatcttctttaacaggtcgacgtgcagtacagacttactggcaggtacggctcgcggaaatcaattatggtgccatcagcgtcaagctaacacgtgatgcccaatagtgacagatgtgaagactctcgtcatggatgtaagttcaaatactgcgctagctgtgttctttgcttgacgtttggtatgctttattgcgatagagagaaacctggaaggagctgttctacatgcacgcactggaccacattcgagactcgttcaataagtttcgcaaactggctgatgctcgggaaaactggaggaaaacgcgcgtcaaacttgcgcttgcaaacccaggcttgattctcactatgtaagagcgaagtaggcaaagaaacatgatcgcgtacttacttatggctttctgtggtactgcagctcaacgaaagccatgatgcaagatggaaaatgtctctgtggctggtgcggaaaccaagatcacacgactggggacgcgagttgtcctggactggcagcatcgaagaagaagctcgaggaccgacaaaagaaggcgaatgcgaagaagaacaaactggcggcaaaactgcagaatgcaaacgacagcattcaagcagctatgactttggctagctccgctggagagtctgtcccgctgaagacgaatgttgagccggcaactggtggaccaattcagccaacgcctccgagtatctctgccccacgacgacttcgcagtccaagcatcaagatcgcagctcaaagtgttttgtcgattgaaactactcccgcagctgcctcctctaaccaggctgaaacagacggcgttcccgagaaaccaacaagcaaggccgaggaaacccgcgccaaaactccgggtacacccactcgcgtcgttgccaaccgaaaactcgccatctccgactttccaaggcttctcaaggcgtctaacagcctctacgcaaagtaccaagactctcctgaaggcaaaagcgaacaaacattacccgccataaaggtggaggacgtgcggaaaggtgcattcacggagggcttggctgaccaatacaaacacgagatggtgcggaaggtgaaaagactgtcctcgatggagcagtacatcggtgtgcgcttcaaggttcttggagacatcacggctgcccaagaaggtggcgactaccacgagcactgccggcttcctcgtaagcccaagattccaaaacccagtcgccggttagtgaacccgaagacgaagcagcctcgacccgaccgcttcaacaggaaaattaaccgcatgatgaggaagatctggaggaaagatcacccgctgccggtagtcgaagaaagtctgcgagatccttagcactgggtcaaagctgtattccatttgacaacttcgctatgataaggccttggacgccttggagatcgcgatgagctcgacgagaagaggctcgagctcgttgattggcaacatcgtggcagcgtcgcacagcgccctgctggggtcaagatgcgtctcaaagaagaacccatccacacccacggctgcagccattctcgcaatcgtcgggatgaactcacggtcaccaccactagttgtggctccagcatgagcgccactcggtcgttgaatactgcagcacaagaaagaaatgcactccgatgagcaatgactcaacctcagttggtctcagcggcagcgtggccgtccgtacctgtgggtgacgtcctgcacgacgaggccatacgatttccgcagcttaggcagattccgcgagtccaccaccaagtcgccgtaaccgaacatgcttccacgctccgtcagaatgaagtctgtagacacatttacgcatacaaggtcagtcttaccatcctcaaccaagtcaccttttttcttcccctatggacaacataccggtatctctctgcgtcactgcaatcttcttggccgcaagcagctacagaatcaacgcatcacgacacaattagaacaatactctgatcaaccagcttgactccagtgcctaccatggtctcagccgagagcatttgccccttcttgaggttcacgagcctcccggagttcgcagccgccacgagcagatctgtctgccgactcaggaaggctgggatctggatgatgtccgccacctccgccactggagccacttggtgcgtctcgtggacgtctgtgagcactggcagccccgtcgcttccttcacctggcgcagcatttccagtccgcgctccagtccagggcctcggtaactcttgagatcctggcggtttgccttatcgaagctcgccttgaagacgacggggatctgcaggtccttctggatgttggacaagctgcagcgagtgatgcagaggttgtcgtcaatgacggttagtaggttttagtggtgtagccatgatgcaaggagctcgtaccgatcagcgatggccatgacgacctgctcggactccagcacacatggcccagcgatcaggaagaacggggacgcctcacgcagcgtcctggccagcacgtggcggtgcatcatgctcgactcgacgtgatcgacgtcagccgcaggaatggttgatagggagcattttgtgttttgtgacatggatacatttgtaaagtttggactattttcgactacaggtacactacaccctggagaggctcgtggtgccgtagtccgtggtggtgtccttctcctgggcatttggatgtgatagaatatctttcaccgagctatgcttctcgaacggggactggatggctgcgtcttcgccttcatccacgacgttctgcatagtggcgtcggccgacagctcgcggttcctctggatgacctccctcaccgcgtgcttgaacgccgtctcgtcgtcgctgtgctccagcgcctcaatgaccatattggccagtcggtcgacctcttcttcgagctcctcgtcgtcgtagatcaacctcatgacctccatctggaagcgcagcatatcgcacgcgcagaagatgatggctacatagagcgccggcccccgcttgatgaccatattcttgtccagcaccagctccacgaacgcgtagacccacatgaggatcttgagtcccatgaggttgcggtccaagttgtcgggattggggccgtacttgcccagcagcttggcgctgtggagcagcgtcagcgtacacatgagcggcacccacgccatgtagtacgtggtctgcagctcctgcacgtcgcgcttgcgcgggtccgggctctggaacagcgacaccatgagcagcagcgacaggtacagctccagcgtgcacaccacaaagggcttggcgctgtcctggtgcagctccttgatgcgctgacggaccgcacccatcttgctcagcattggtatccgtcgagaagtggctgcatggcaatcaaacatggctacattgctccaatatcctccaatcgttttcgcatctgcggacatggtgcgcgtgtacttcgacgtctcgatcggcggctcccgcgcggggcgcatcgtgttccggctgtaccctggtctccccaagacgacagagaacttccggtctctatgcacgggcgagcgcgggctggggcgcagcacgggcaagccgctgcactacaagaaggtgccgttccaccgcgtcatcaagggcttcatgctgcagggcggggacttctcgcgacgcaacggcacgggcggcgagtccatctacggggacaagttcgcggacgagagcttccgctaccgccactcgaaggcggggctgctgtccatggccaacgccggcaggaacacgaacggcagccagttcttcatcacgaccgtgcccacgccgcacctggacggcaagcacgtggtcttcggggaggtggagagcggcatggacgtggtgcgcagggtggagaacgtggagacggtggccaatgacaagccggcgcccatgcaggcggtggtgatcgaggactgcggcgagatcgagggggatagagcgtcagactcggactcgtcgagctcatcctcctccgacgagggccgagaggagaggaagaagcggaaggcgttgaaggaggagaagcggaagctgaagaaactggagaggaaggggaagaagagggcaaagaaagagaagaagagagccaagaaggagaaacgacgacgcgagggggacaacgacgaggacagggacagtaagagacaccgtcgggatgaagatgcacgaggtaggagtacggagaaaggctcccgtgacagaagtggagaagaacgacgcagcaggaggaaaagctcgtcgcgttcgaggtcgagagagcgctcggggcactctggtagccgcagggacactgacgtgagaagacgttcgagtgagcgagctcgagacgaaacttctagatcgcgtagagggcggagtcccagtgaatcgcgcaatgattcgtatgatcgaaggggacggaattcttcgcggcgagagcgttccccgcgcatgtagggctacataccaacagcaactacgaaggaaccaattcgattttggtaagaaaagcatccgtgggcttccctgcacgtcagcacccctagacattttttaactcacccatttcaattgcggtgacgacggagtcatagcggtcttcgtgagcaccattggaatcaacttcgagcaaagacgtcagaactggctatcggcaccgtcgaaatcaccaagataacccgatagattgatggagacggacatgattcataatagattttatatttaaaacaaaagaaattattaatataaatataattgtaaataataatatttttaaattacaaacaaacgattttggagttaattatattgatccctgctcactagaactattaatcttagagcttaaaaatgaattaaattattaaaaaagaattatttattaaatgaatattttttttaatatataaataatataactattattacgtctccatcaatcgcaatttgcagccacaacggcattttcactctcaatggaggaaggcgataagactgaaatcggcaccacgtcttttgccccctttccagctccatcataccgctatgtcgtctcgagcaagtgcaaccaactgagcgtttctcttgagcactataagacgaaaaagaaatggtgctgtttttgcttctttcctttggcagagaagctggctgactaacaatgaaaaggatgataacacaggagcacaggctatttggacgaggccaaatacttgacaggcgccaactgttaaacgagaactatgcagtaatctgtgttatggttaccctcctcactaaggtgttccatggcgctctggaatacatgatgcggttcaccaacgggatggatgacgcggggagtgactcgggcgacgactctagctacacgatgaagaagatgaagaacgcaaaagcgaggaggagggccaaaccacaccggaggttgaccccgaaaaaatccgtcgacggctcacattccttgacaacgacgtgctgcagctcgaactgtcggccaaaatccgagttaatgggtcggcttggtcgccaaatatgtctttcggctcgagctcgtgcccctggatcgaactgacatcctcgaagccaggattcgcgacctggaggttggcggcgagcaaagttatggcggtgaaagaaagtgaagagttcgtgtgcgtggcagccaaaacagtgaagcctgccgagaaaaacgagaaaggagagaccctctgaaggggcaatttgccacgctgagaaatgacgagtacgagataaatattcgccactctggctggtacgttgtcacggtaaaggtgctcgtggagctcgagcaaatgggcagctgtgacgtcgagctgcgagtgaacggagagtgcgttcaaagcgacagcgtctcggtgaatatcagtcgcatggtgcgtcacttacgctcacaatccacctcctttcgggttacagactgacagtcgccacgacgaatgccccgacccaagttgaagccaccctcacagccgccaagataggagtgtgagccattttgcacttcaacttgaatttcgttaaaacagtacatgtcaccccaacttaacgagataaataacgtattgaactcgcatcatggcgccggtaccggcgtggactcgcgagtggcggcctctagcgcggcagctctgcgcgcgcgtgctcgaccgccagccgcacgatggctacaacaacgaagaagatgatagagaagaagccgcgtcctccctgccccaggagacgctgctgctgcgcgccgaccgcgtggtggggcagctctactcgcacagattcgcggcctgcctgccgcaggacgtgcagagccacacagaggccttagccaccaagttccgcgtgcattcgctcgaggaccgggccgagaagctgctgcggctgggcgcccagtgcgacccgcaggtgctgaagctgctgctggagctggcgacggcccccacggccgcgtcggaccgggacgtggcggtagacgaggacggagacggagacgcgccgagcgcgtggaagacggcgctgcagcaggagcagagcaggcagcagaggcagaggctcatgcaggaccagctggtggaggagctcttacagatctccaccaacgacgagtggtaccaggcctgggacgccagcgacgacgaagacagcgactggagcgaggtggacgacgttgtggcggaggaggagtctcctagctctaagactaggcaacgcaatggcaagaggtcgagcgacgtgatggaggaggtggaagcagaggtggaggctgtggaggaggttctggacgaggagacgatgcgggatcggattctgtgtcggtatcacccggaggtggagcgggatgacgagatgggggtggataatgaggaggtgcaggatccgacctgtctattggagaagaactcgctggtcccgtttacgctggagcggccgtggttgttgtgtgaggcggtggtcaagagtggacagggtggatcgctatcgaactgcgtggctcctcgtcgactcatccacgagcgaacggtggtgagtatggtgttcgaggcgctggacggcgtggagtcgctgatgtttgagctgcgtccagctcaacctacgccggtgatttttagtgtggatttccggacgaaggcggtggagcggtctcgacgatcgctagaagtggcggttgggcatctctcgcctttagcgctgcatcacatgctggacgagttcgcagtagcagcgtcggagctgcagttgcttcgagacctgctggggtttatccgtcgagctcgggatttaagcgagcagcaccggtgtgtgaccctagaaggactcgccaacgctctctctggagttgtcggccagttgatcgaaacgatacgcacggttgagcaagaaatgtgtagcgcaataacactgagtgacgatagtggatcaagcccgtggtctggaatcgcagcacgacagcccacgctactgggggtgttcggtgggttaagggagacgttcaagctgatttcgtggctgaaaagggtgctggtccagtgcttccaaggtctctcagagcggcagtggcacgagatcagacgtgccgagcaagcaaagtgcgtgcttgatgctctgtactgcatgatggaggtggaatacgtggaaggtgtggtacccgatgaaagggcaagcgctgctggtggtttgtcgcgatcggaggttctactgcgtctctttgttggagcgctgaacccgtacttggtcctggtaaaccggatgctgtttgaacgagggcactttgagacgattccgctggacggggagctgttcttcgctacacctgcttctataagcgttaatgcatcgccaatgcgagaacggaatcaaagctttcgagagggattgccgaccctggctccgttcgaagtgcatcggtcgcttgttccacggtttttagactcagtcattgacttgatgaacgaggcgctagctagccgacagatgaagaaccgtttcctgcagcaacagcagtgtacagctgaggagtctctcgtggagcctggacaaccacgaccctcgctgcgtgagttacttgcacatgaattggaaacgatgggaatccaaggaggcagtttgtcgttagcacaacgcagtggtgatattccaccatccttggagcgaataatgatggaatgcgtcccatttaatcgaatcttggagcgttgccttactagccacatcgaggacaaggtaacgcgatctcattgtgcggtgtattgacgggttcctaacattttggtgctgttgtccgctctgcagtgtcaagagctaaatggagaaatcaccgacatctttcgagacaaaatgggttacatggagcacgttaaagctcttcgaatgttcgtgctgatggagcaggttaggagtcctaaacagttgctgaagttgataccggtgtctgacatgcatttcgcagcaagatgtgtttaatgttttcagcgagatgctggttgcacacatgcaagagaatcctgtggcgtgggctgatagtgagaagatcaacgcattccaccaaagcgcggtacaaggagtgttcgaagacaactcgctgtcgtcttctcagcagcaaattggcgggcggctctgtgtccgggttgacttcaaccgacttgatggtgccactggtggtgcgaagattgacatcacgaccatgaaatgcttgcacttctcgtttgctgtgcagcagccgcttcgagttcttttcagcgcttcaattatgcaaaagtactcgcgtctcggggtgtttctggtgcaagtgaaagcggtggagtcggcccttgtcaaggtacggagtgtgatcggacgtgccgctgctacagctctattatcactgacttcagatcgtaatgttgcttcccatgcagttcaaatcaacactccggcatcgacggtgctactctttgtacgtgcgcagcactggagaacgattttgttgctgctcgtggctcacatgctgaatgaatggtgtgctacagtattgaggcagacatgcggcaactactcattcaagtcgcagacatgctgcactacacgaaaagtatactgaactacctgacaagccaggtacgacggcgcatccatgatactggggctagctctgtagtttacacggaattgtggtgtaacaggtatcaagcgaggggtggtcaaagtattgtcacattttgcgttcgtcgcggagcttagctgaggtacgagtttcttcattcgctctgatgctggcatgttgctcactcgattttatcgctcttagatggatgctacgcacgagcagtatcttgagcacttgctcaatcgcttctttctgttggacaaggtaggtctcagcgcagagtttgacggaggagcggcgggcgtctgaggcactgtgtttgtttatcgtacatagcatgcggctgtgatccagtacatcctcacgaccttcaatcacatcttgaggttcgtcggctacgtcaacgacttcgtcagcgctgtcgaccggaatctgcgcaaatacttcccgacgtcctggagtgaggacgatggcagtgatgaggagacgaagcctgtcgcctccaagacaccgaagacccgcctcctcctgcaccctgacttcaacgtgctctacgctgacatgatccggagtgcgaatgaattcaagcgccagtctcatttccttgtggtcatgctgacggccatgcaaaagcacggcgcgtctccccacgtcaacgagatcgtgacgcagctcaactacaactacttctaccaccagcaagaaactcgatcacgagtgcaacccccagctcagcagcagcagcagcagcagcagccagtcaaccatgccagaagaggaccccagctcaatcgagcagaatcgctgcgagccccgccagctccgaagaaattctcgcgtacccgatctgtccacattccgtagtcgttgatccccagtgtaaatgttacccagtcatgaattagcgagaggggttggtgtcgcgggcgcgcttgtgggaggcttgctggggtttgctgcgtcgaatagcggcagcttgttccaatgtgaagacggcgcggtctccaatctcctgcaaggtggcggcagtattgagattcggacgctgagcgattggagtcgtggcgaattgcacatttggtaggtacctgtcaagcaccaaggtacgtcagcagttgatgatgtccggccagctctcctattgcgtgttcttactcttcgtagaggtcatgctcagggatttcatcagggagactgctgcgctgtccgattgctgtcgcgacaattgctgcgaaggtcttgcaggcgtcgactccgctgtaacctcctgctccaagcagcagaagtgggagctccagattcatcatggcctcaacgcagtcgcagataccgtcaccagtaaggttaaaccctcctagcggatctcgtgccaacgtgtcgactccgcagacaaacaccaccgtctctggctgaaccgcctcaaccgctttgcccacgatacgttggaagatctcgaggaactggtcgtcagtaattccacgctgcagcgggacgttaacgttgttgaatttgcctcgtccagctccaatctccttgtcatccccagtcccagggaagaagccaggctcatgtagatggaacgagatggtcgtgaccttctcgctgtagtagaacgctgcttgcgtgccgtctccgtggtgaatgtcgatgtccacgaccagcacgcgcttcatcttgcccttagacagcagtcgctggacccccagcaccacgtcgttcacgtagcaaaaccctccagctttggggcgcatggcgtggtgcctcccccctccaaggttcacagccaccggtgctggctgcgacttgatcatgtgcagcagcgcagccgcagcagtcagcgtcgctcctgcaacgtagcagcagtactccagcagccctggaaacacgtaggcgtcgtctaccagcccaaagtcttccagttgactctgaatctccctcttcctagcagacgccactctgctgctctctgtgtcacccccaaactcgtagagcgcgtcgacgtagtcgcgggaatggaaagcttccagttgggcacgggttgccaacgttggtgcaagaagctggagatgctgagagaggtttccgtcggggaaacacgctctcagcaactccagcgtcatccgctctcggttctggtgcactggcaggcgactcaacgcctccaagtaggcggaggagtggaggcacaccacatcccgacgtcgtggcttggccatctttcctcgttgaagaaatgtccggaaaggaatggactagcgatagttacccgaaactagcagagacgcgtgccagtctggcgttcatggggcctttgaccggcagcgtgagggagaacccgaagccaacgtcctccgggttctcgacgtagatgtggaacctgctgagcagcgccgccgccaccaacttcagctcgaggcctgctagtgacgacccgagacacatccgaggtccgccgttgaaggcgacgaacttgaaggccgaaacgctggtgatcttcttggtgacggggtcgacccagcgttcgggtttgaactcggccgcgtcggggccccaggcgtggggcatccgacccatagcgtacagcgggaggcagaccatggacccagcggccacgaacgtgccgtcggacaacacggtgtcgcgaaccgcgtacttgggcgcgatcggcatggacggatacagacgcagcgtctccttgatcactgcctccaggtacacgagcttgttgacttgctcgagcgtcggcacgcagctctcggccgtcatgagctccggcagcttcttgtagatctcgcgacgcagtttgctctcgacgcgcgggttctggctgacgcagaagaagaaccagctcaaggcttgggcggtggtgtcacgtccagccaccaggaagttgaccaccacgtcgcgcaagtgcacggggtcgtagagctgctcgtccgtccccgaggacctggcgatggcgtcgaggtacagcgacagcatgttcgagtctttatcttcaggcgccatcgcgcgttgggcgagcactcgctggacgatgctgagaaccgtcgcgtcgatctccttgatgtcgagctggagctggtcctccgcgcccagacccagtcgccgctgcatcttccagaaccagcgcggccgcacgaagcgcagcgctgtgagtcgctgcgcgcgatcgaaagctgcctggaacgggagctccttgttggccctcagacaatccatcttgagtccgaagctgatgtccgcgaacgcctcggtcgagaagcagctcagcagcttgtacaggtccacggagcgattccgagcgcagatctgcttcaatacgtcgtgtagcgccatggtgtggcgggtgatggccttgaccatgcactcccgaagctctttggtccggaacaacccgtgggcgatatctcgctggtgcgcccacttgaccccgtccgcagcgaagaggccgtcacctagcagatccttcatgttctcgctgtactgaggccccttggggaagttcatgaactggtacttgagcacgtcttcgaacgcctccggagtggagaccaccagcatccgaggcaagcccaagaccttgacggtgaacgggttgccctcaaaccgctcgcacgtccgcgtgatccattcgtggaggttgttgccagcgaggaggaagcccagcgtgttgtgcagcaccggaagcgtccaaggaggtcgaccggcctctcgtcgctccggttccgagtccgctcgctctttgaatgcttccggggtctcggctgacgatgaaccgatgcgtctcgagagctgaataacgagagggagcaggagaaagctcgtgactgcgagggcgtggtgcaaaggggtctccagcttcagcgccgacaccgacaacatcgtgacctcgagcgcggatgttgccaagtaagacggatcgaatggagactgtggcgattgccttctggccagagagggtctgtcatccctccagcattcataggaagaccctgtcgctcggatggcctggctccatgcaacgctcgactgccacacgttgcgtgtctcgaagactgcatgttgcagtgaccccagctgccaggcgttcgtgcctgaaaagcattcgaccacccaacttgaccacgtgggagagcatcgcaggaccacacgatatccatcatccaaagcatggcgtgctgcagcagtggaactcaactggaattgctacccaagaagttctatgtagttattgattgagagctactctagtctttagacattcggcttgataacttgccgatacgctcctctcatttgatgcatctgctcatctatcattccatccgtagccgcttgcctactttctttggccatgggatcactcgcagtgtcctgcgcaatcttctcccattcgagcaccaggtcatgcagacgctgtcgcccagtgaggtgtcgtgcttcagcgttggaaaactgcgctccagtgatgtcaaacggacactccatccgacgctcgccaaaggctccggggtatacatcggccattcgcgccttcatgtagtacacgggctgtgcttcaggcttgaagtgcaagacgcggtcactgttgaggtagaacaacggcacgtcgtcctcgctggcctgcttgatagggaacacctgggccatatcaccacaaagcgtcgagttcttctctccgtggtcttcgtattctgtcccaaccgcgccgatcgcgtggtccgagaaggaatactgcgtctccgccagctccgcagcgtagaagtacagctccttgtctccgtacgaaggaggggagccaacatcgctcagcgccttgaacgacgccaggatcgcagtcgcgcgaggctgcttcttcttgctccagaacatgagagacgagtcgacctggtgacccgtgcggaggttccacgagtggctattgagcaagtagtcgctgggctcgaactgcagttcgaccggggcggggttcggcagcgtggccttctcccgatccagagtggggatgaagcggaacggggcagggtcgaacttggacatgtaccgatgctggaaggaaacattccccgatccgcccacgcgctcggccatgaagtagatttcgtgcgcgatgcggtcgttcatgagcaaggtgcccgtggccttgaacttggccgaatcccagagcacggctgggctcacgaagaagcccgtgtcggcgtcgatcatcatgatctcctcgaactgggagaacaccacggacacgaccttgatgtcgaagttccggaacttggtgtggcacgcggccaagtcttcgcagaaaactttcttggtcgagttgctgtcggcctccaccgtcgcggcagccgcgagctcacagacatcgtagaacctgatgggccccagtgctgacttctgcatgagcagctcctgcgacgcagcctccacgtctccacagaacggcatctctatggggtcgtcgacgcccatggtgcgcagctccaggatgagcgacgctgcgagcttgacgatcggctcgtacactgggatcacgatgccccggggcttcgacgtcttctgcgcgatggcgttcagcgtccgcaccagcgccagcttctcggggtccacgtggagatccacatcctgctcagcagcagcagcagcagtctcagcaggctgctggtgcggctgggtccgctcgacggtgtggaagacgtgcgtggacgtggggagcgtgctccacgcgagcttcgagtcgaggtagacggcgatgagaccgagcgacgccagcaacgcgatcgtgaacacgcgaggcgtgcagcgcttcacggacaggttcatgctcgctgcgtcggccggtagagcgttgaggaggagagggcgttcgttgcgcgcgaggggggcacgacgtagtacgttatggacccaactgcctgcccgaagatagtcagacctcaaaaagagtggagcgtgagcacgtacggatggatttgtattggcggggggctctaaacgcattctcccgcttgggttgggcgttctccatgccgctcaggagcgttcttagtccgagctactgtaacttcgcacttcagctgcagaagggtcctcataatgtagccatggctaagaaaggtcctcctcccgctgctggcagatcgccacaggttatgtagccatgtctcaacccctctccaagtcgatgtatttgatgtaccgccacacaaacggtaattatcgcctcgagctcaggacatcgagttggtttgcccgtcatgttcctcaagcgcgaaggagacgagagcctgcagcccaagggcaatgaagactcggcgcagctgcagcagatgctcacgtcctgcatgatcaaccgccagatcctggtaccgatctgctctggtggacgcagcactgggacttctgctccaactgacttgtgtttgtgtgtcatagtgctgtattgcaggcgtcctggtgggcatccccatcagcatccagcggaaatcctacaagccattcgccatcctgggcgtcctaggttcgtgacaatagcgtggcaatgcaggaggcgttgtgctcgtagttgtattgacgtctgtgtgttactgacaggttcgttcgtggactactcgatcccgtacacgaccgactgccggatgatccacaacgccatgcagttggcgctgcaacaggagcgacagagagacgctgccaagccgtcaagcggcgacgcttaatcgcagacgctttaagcaataacgaacagcattgtgatgaaacttacggtttgtacttacggacgtgttcgaggcaatgcggagtttcaattcagttaaagcaccgcccacttacgcgaaatcagggttggatggtagcgcagcttgcgacaccttgacattgagggcgcctttcaacggcagcgtcaacgagaggtcgtaggtcacgtcctccgggttgagcacttcgacgtggaacttgctcagcagacctgccaccaccagcttcatctcgagcatggccaagttcatgccaagacacatccgaggccccgcattgaaagacgcaaacttgtaggcggagaccacgatcagtttcccggtgctggggtcgatccatcgctcgggcttgaactcctcagcgtccggcccccagacctgcggcagtcgcgccatcacgtacgtcgcgagtacgataagcgagcccgccttgacgaacgttccgtcagacagcgtggtgtcttccacaacgtacttcgggatcatcggaacgggtggatgaagtcggagcgtctccttcaaggcggcttcaagatacacgagctggctcacatcttgcatcgttgcgtggctcacatttacctcgctgccttcaatgtttggcaactttttggcaatctcattgcgaatagctgtctcgacgtcggggttcttagcgaggttgaggaagaaccagctcagcgtctgcgctgtcgtatctcggccggcgatgaggaagttcacgacaatgttgcgcaggaacatgggatcgagttgctgggtgtcgctgtctgcatctccaaggaagagggacacaatgtccttcccctggctggcactgccatcaatctcaataccactgccgatgcttgaacgcttcgctagcgccttctcgacaatatccagcaccgtcttgttgatcacctcgatgtcgttcttcagctgaccctcggcgccaactcccagccacttctgaagctcccagaaccaccctgggcgcacgaagcgcaacaagagagctcgctgggcatggtcgaaggccttctggaatgggtgctcctcctccgagtccagacaccccatgtggactccgaagccgatctctgtgaacgcctcgatcgtgaaccggttcaagagcttgaacagatccagagtctcattgctctcactggtctgtcggaggatgtcgtagagcacaacagcgtgacgttggatgacgaaggccatggagtccctcagtgctctcatagtaaagaggttgctggccgtcttgcgctggtggacccactgctccccatctacagcgaagatcccgtcgcctagcaggtcccgtaggttttcgcactggtaggatcctttggggaagttgctgaactcgagcttgaggacgtcctcgaaggcttctggtgtgcaaacgatgagctggtccgggacgccgatggagcgaaccagcactggttctgcgttggattcacggcagctgagcagcgttcggtcgtgtatatccccggcacgagcagcctcgatgacggtcagcgtgttctccagcactgggagcgtcgcctcggggcggtggatcttccggtgcgacttcttggacggatcctccttcttggtcggttcgtagggaggtttggccaagagcacgacgaccgaggcgaatacgagcgttccgatgccgagtttcactgggttgaaggggagtttattgcgcagcgaggagaccgacagcattctttcttggagttgagctctagctggtccgttcgattctgacaagattgatgcgaggtcggcgacgttgaagcttgcggagctgtcagctgccagcaaagatgagcggtgcaacaccagcagggaccgtcgagcagcgaaataactatgaaacgacagtccgttgagcatggcgctacgtgtacgtgtgctagttgtcctgcaactggaaggtgaagtccatgcctggtgatgcagaacacgaaaagcattagggtatttcaaagtcgatgcatcatttgtggttccgtgagtatccattaccgtagcgttcgagctcatactgcagtagcaagatccattcgaccacaagttgggcttggaccatgtagatttgcgtctccagtacgaacgctagttgatacaggagagaaggcgaatttgtgctgaagaaaccagtgtagcagtagcaacgacacaatctcgagggtagctagcaccaagacgtttgccgctgcacctggtccgaagtggccagccccatcgggatagtacgcgacgttcggtagatgctcgagcgccgttttgtacagcacgaagatgagcgacacgatgcactcaacgtactcgaccagtatcaagtattcgcaatggaacatcagctggaggccctgacgaaccagctttttaggcacttcaccggagttgggggtaacaataaacatagtggagggcccttcacctacttccttaccagtgctggtgatctctaaagaagttggtgcaattcttgccatttgaacttgcaaacgtcgggttggttttgaccttgtactcgactcgactgtcgagggtgaatctgactgcccaaatactggagacacttgcagcgcctgcagcttatctatttgctctttcgtaagaggatgaggacaacaagcgcgcagtcgtacacctcccagtgacgtgacagagaacacctttggatctctaattactgacaggataagggtgttttcatcaggcctccagacctggacgactttttcttcaggtcttgaagcaggtcaaacacggcgttcgcgctcattcgcacctcgcgaaattcgagcagtgcttgaccgagatctgcagcgatgaacagcaccgaaaggtacgttgatcctgaggtcgacatacaaacggagacaaataatgcactaaagaagtctactgccgtggcgacaattccaaggataaagtcctccatctcgggagtagaacgcaccacaaattgttttgcagcgagtctccagaccacccctcggtactccgcaggcacacatctgtagaaagctttatagagcgggaagatggtacctagacccatggccgcttgaatgtagcgatagaagcggaggacattgggacggcaaggcgccgatctcgaaaagattgcccgaccgaacacgataagcatcatgattggaaaatacaaagcaatggggacccctccgatataccacgtcaatgggatcggaaacccaacataatttgctccaagaacgaaagttgccacgtagaggccgatcacacctacttacacacactgtcaatatcttgcaaaaagtcggatgcagctccggcacaagcacaacgagttgatacaacccaataaggcacatcatcaggtttgacagaccaaagcgaagccaaaacaccccattggcactccacgattcggaaggtgatcgaagtggcaagcattcgagcaatacggcgatgagaagcgctggcagcggcgtgagaacgcacaccaacagcactcgagttggcgatgtggtcttgcagtagtgatcgaaactctcgagacgctccactgagtatgatccctggcgacccacttgaattctgttccatctctcctcgaggcgctgccaccaccgcatgccttgagtggctgaatctgtatcacaccttggcgatacgcgaggcatggtgagaagagaatgatgtagtattcgaagcaagatctatggatagctactagctatttgtatgtcaagtgcactaaacggtacgagaaagtcatctcggaaaaaaaaaatctgacagcgtttccaacgcgattgctgtaaacaaagtatttatgcagctattttgtattgagtcaaaccctcggtcgatctgtaccaccgagcgaacgaaggtctccgctatctctctcacttctcgctactctggcgccaggcgtccacgagcgacttgaagatgccgtcagtcttgcgttgcagctccgcgggcgagccgaactcggccaccgagcccttctccatcaccagaatgcggtccgagtccaggatcgtgttgatgcggtgcgcgatcgtgagcgtggtgcagtcgcggaactcctcgcggatgctctgctggatctgacggtccgtctccgggtcgatcgacgctgtggcctcgtccatcagaatcaccttcgagcgcttcagcagcgcacgagcgatggacagcagctgacgctcgcccacgctgaagttcgagcccttctcgtccacgacgtcgtccagcgacgtgaccgccttctgcagcgacgcgcgcttgatggaagtccagatctggtcgtccgaaaactggttgaacgggtccagattcgagcgcaccgtgcctgagaacagcacggggtcctgcgggatgatggcgatgttggcgcggaggtcatgcaggccaatcttgctgatattgacgccatcgatcgtgatggagcccgcgtcaagctccacgagtcgcatgagacccacgatcagactgctcttgccagcgcccgtacgaccgacgatgccgatcttctccttggggttcacgctgaacgttagtccacgaagcacacgcgggaggccaggacggtagcggaggtccacacggttgaagctgatggcaccggcagtaggccactccaaggctggcttctgagcggcggtgctctctagggccgcttcagtcggcatatcagtgtaggtctggatgcgctccacggataccatctgcgtctgcaactggctgagcatgcgcacggtccagttcaagggctgcgtgatagtgaacgcgtacgtgagtgcgacaccaacaatgccagcgaaagccgtgccctccgcagcgtttgtgccgtgggcaatgaccgcggcaaaggcagcagcggccgcgatgcacgtgccgacaaactcgaggcgcagcgccagccagcagttgatggtgaagttgaggaaatacgcacgctggttcttgtccagaaggtagttgttgtggccgatgaagctgctctctacgccgaaagcacgaatcgttgagaggccatccagagtctcggaaagcagggcgaatataggggaacggctgatggagtccaatcgctgcagctcacgagaagtcttgatgaagtaccgctgcgagcagtagtatccagccaggacgggggcaagaatcaccatgaacatcggagtaacgtacgaaatcgtgaccagtgtgatgacgacggacaccatagtgttcagaagacccacgaccgtgccagggatggcttcatccagtgtgtaaatgtctttcgacatgcggttcacaatgcggcccagcggcgtcgtatcgaagaacgaggtaggcgcgcgcagaatctggttaagcagcttgttgaagagcaggcgactcgcgtggagggagcccaggtacagcagaaccacgcggatgaacagcagcaccgcgtacgccaggttgatcagcatgtacacgtacacatagtacatctgcgagtccgggtacttcgacgcttcctccgaccagtacgaaatccacacggttgccagcagggtcaaaccttgtgcggcaaagaaacccaacacgaccaggaacgcggcgcacatgccaccgaacgcactaatccacacgcgatagacagaccaagacacatcgccaaccgaccggtcctcctccaccattaactggccttcctcttcaaacgcctggctgtcgtcgctcctcgtagacgacacacgagaacggcggtgcatgcggccctcagtcgacatcctctcgtcgtcgcttgagtcagccaattcgtcctccaccgactcagccgacgtagtgttctcctcgtcctcctcatccttgtggctctccacgtagttcgacaccatctgagccaatacgttcttcttcgccatcagcttcttgtatgagccgtgctcggcaattcttccgtcggcaatcacagcgatctggtcgcactggttgacgaagctcagcgagtgcgtcaccagcaccaccagcttgtccttcagcgtcttcttgatgcactcgttgaagatgtcggcacccacgtgactgtccaccgccgacagaatgtcatcgagcaggtagatatcagcgtcctggtatacagcacgagcaatggcaacacgcgtgcgctggccaccactcaggttgatacccttctcaccgatctcggtgcggtctccggccgtcaagatacgcagatccttcttcagcgaactcacacgcagagcctcctcgtactttccggcgttgaacggaagaccgaatgtgatgttatcgcgcaccgtcgcgttctgaatgaacggctgctgcgagacgtacgccaccttgccacgaagcgccaccgtgccggcactgcagcgagcatcgccaaggattccagccagcagcgtcgacttgccactgccaacatgacccacgatagcgtgtagctcgcccttcttggccgaaaagtcgatgtggcggagcgtggggtcctcggcgacgggagtcaccagcgcttccttctcctcctccttctccttcttgttgtcaccctcagccggaggggcagcgtcccacttgaagtcggcaccctgcacggagataccgacctccgtcaagtcgccctcgcccaccttgatgcgctcctcggccaggaagtagctgcgcagacggtcgaaactcacgctcgcctccacgacgttgttcagcacctgcggcagcatgaacagcgggaaacgcaggatgttgaacagcgccagactcgtcaacgccgtgccgacgtccagcgtgtgacccaggagcacgtacgcactgaaagacaccacagtcaccagcgatggcacaaagctgaacagcgtgttggacgtactgcgcgcgaacacgtacgtcctgaggcgcgccagctcctcgtcgcggaacttcatgacgcgctggccgaacgagttctcccacgccttgagcttgacaaccttgatgccggacagcacctcgacgcagatcttgatacgctcgtccttgacctccatcaggcgctgctgcagcttgcgcatggccttggagatgaaggtcatcaacgggatcaccagcaggatcacggccacaccggcgaacgtcgccacgccgatctgctgccacagcaggaagcacgacacgatgatctggaaggccgcgtaccacacggcgtgcaggtacggcgtcatgtcctgcagccgctgcgcgtcgatggacatgaggttagtgatctcgcccgacgtgcgctgctggcgcgcggccgccgacagcaccatggacttctcgaacacggccgtgacgatggcgctgcggaactgcatgcccgtctcgtagcagtagaagaagtactggcgcagcgcgaaggactgcacgacgcccgacacgaagatgacgccggcgtaagtgaggccctcagacagcggcgccgtcgggtcgctcaggtacgcgatgatgtccttgatgatcatggggcccacgaactgcagcgagtcgtggatgagcttgaggaagcccgccaccacgaacttgaagccgaaggccttgcccagcgcccacacgaggctaggcttgccgctctgcttctgctgctcccaggcggcgccgaactggcgcgacacgttggtcgcgcggttgtgcgggtcgagctggaacaggtcgtcgctctcgagcgggcgctcgttgcccagcttcatgagcggcgtgacccacgagaagaagacgttgccccagcagccgctcagctgcgacgggtagcggtcgcccaggccgggcgcgtccacgggcatccacgtgccgctggacttgtcggacgtggcgccgccatcgtgtaggacggtcacgccctgcagcagcggcttgcgctcctcgtcgcggcggtgcttggaaggcgccatgcgaccgttactttctctctaggggcggccttggctcggtctctctccgcctgcttgaagctcttgccgtctgcggcgccgattggagactgagagacccgctcgacggctgctggccagtggagtggaccacccgtgggatgcataatcaggagagtgatggtctttttgattaccgatgacgatgactgcaacaccggcagatgggatcacgacccgattttgagctggctcaacacggtaaactacggcgtgaggctcatcgaggccacagcaagcggtcaatgcatgcagcatgcagtaaacctagaattgattgggtattgctagcaagtactgtgcaattttaattactgtacgtggctttagccaaatgctgaatgagtcattcacgtcattccgaatcacgcgcgcgggtttgtcttgtttcttcatcgtcatgcatgcattcgcacgacacggcacaccggattatgtttggatttggctcgaggctcgcatcgttaagcccctgaggggcgttcttaacgaactttaaaaacgggttagcagcggttgtacgggtgtattgttggacagaggatattagtacagcacagcgaaaaccgatacagtaatctgcccgagtaaggaacgcctgatatatataaagacgcagaatatataaattaatgttaagttgagtatacttttccaatgtactgatttaattatttcaaaatgaaccgaagagcagctttacctacgagtccggaatgattccaacagtggcgtatggtcgaaacactaaccattgaccaggcatcctcgcaccacaacagcgctgtcaactggtcgacctcgtagtctagtaagatcgctaaatgcgcgccatttttcaaacgagggtggagagctgatgattggcactggatttttcaccttagtgccttagtaccttgcagtaccttgcacatccccctatcgccacatcgactggaaaataatattaaatatgtgaggctattagttgtacacccgttccttattcgggcagaattctgtatcttgatttttgtattggatcatgggctttgcttcgctgcgctgggcaaaggcagtcgctgcgctcctgcgataaaaagattctctcacctggcgagtacagtgctcggctcgctggaatgctcggcgctggggccgcctccgcagacaccgcgcggccctgcttcgcgggcaccccgtgcgggtctgctatgcgcctccgttggtcctttctctggcccatgctgtactaatcaggggctaatgttaactcgaaaatgggtaatattgatattgatataatatcaagcaccttcggttttgatatgtaaaatattatatgatatttggatgtctcgggaaaagtaataataatagttctgatatataatatgatatattaatatctcattaagtacgaaataatgatgtatatctcgtcttttttgccaatcgatagctagcttgagaccattttgttagcgtcatcatgaatatcagaacgattttaggttgatccggcataccattgacgcagcgtcacattctttgtgtactctgacatgatgatagctaactatagagcaaacgttcaagctaccagaatttggtacgtttgaaccattgcaatacttacaagtattagaacaacgtattaacgagcacatggtaaccaaggtatctgaatactcggaccaggtatttattcggatacagctgacgctacccggtccaggattcagatacagctggaccgggtatttacctttcaacgctgtctgcacattatctcaaagcatttcttacttcagtaatattgtgctttaacgtcatcgctgataacaacaacgacgcttgtaggaagcaataattcatgtcagcgtgcacgtttagatatcgagtgtattcagttcaaatatgaggatcgtgggtaatatttttacgtggggccgagctaacaaaacatcttacacgacggctagcacaagctctaggtgatgttcattgccatgctgagagaactcctaccggaggaagcgcactccttagaggcaagaggcggaggtcttctggaaatatcatatagaatatttgatattcggtgagatttgaaatgatatatgaaatatctgattgatatcaggtttgactacctaatataacattaatacagaatattatcaatattatattcgaaaaaatatcattaataccgtgttaacattagcccctggtactaatagacactttcgtattgttgtacgccgtacaaccgacataaggttaatcgcacaaacaaaatagggaaatccacagaccacttattgtgaaatccacagatgctgtatgcacagcacgtcagcacatcattgcgtcatcgcctacacgcaatgacgcaatgcaacagcgcgtacacagcaaccagccacttaccaactttagccgtagtgcagactcggccccgcaccaacgacacccgtccgcttcgtgccggcccccgagcttcggctggcctcctagagacgctcgtcgcttcgtaccggccccccagacgctgtcggcttcgcgcttgccatccaagaggctcgtagcctagcgccggccgcccaagatgccagcagcggcgcggcaggcgcctaagacgccccgagtagcgtgctagcgacgctagaaggatgacaacggccggtggacagcggaggacgaccggagacgtgctttgcgagggctttttgacgaaacaagcgtatttttggagggacaagaatggtggtgggtttttcgtttttagagttatctgccttctggaatgttggcgacacggtgaagcgaaaagtgtttagtcacgcgctgtgcgagcaggctcttgaagaagtcaaagagctgggattcaagccgatattccgaaaggtctacgcgaagaggctggacccctttcgcgaacaggtgtcaatcgaagtgctcgacgatggagttagtagcattcatgccatggtggctggacttgtggagggcgcaaacaatctatgtgaggttaatgtatctacgtggcatgcattgaagtcgacacctggtggcagaacacaggctgtgcaccaagattatccccagtttgagatttcacgcgctcttctaaagcataagctcgttcagggctccgtgattgtggcgctaatgaagaacacgttgctccatgtgtatccgcgttgttttgtcaagcgaaaaaaaaacgcagagtcacgctgacgttaaatgaaggcgacatggttctgttcaggggtgacttggcgcatgcaggtgcaaagtacgaagacgagaacattcgcctgcattgttacgttcgcgtcagaggcatcaggcatcgctcaaatacaacagaggccgtcccgttcaaaagctatggatgcagcaagtgcatgggcttgtatgattcgcgccaggggctacgcgagcacaaattggtgtgtgattttgaagcggattttccctgcccgtactgtgacagttccttcaacaaaccgaacacgctaacgaagcacatcagccgaaagcatcccggtgagcaccgcgcgtggcgatcgtcgcgtcacgcagacgaggaaatggaggaggcaaccgagagcgatattcacgacgaagatggagatggtgaaggagagagcgaggacgacgaagaagagagcgagggcgacgaagaagagagcgaggacgaagaagaagacgaagacaaggaagaggaggaggcggagggggaagagaatgagagtgatctgagtgaaccggtgagagctcctcggaggagcagatgagcgagagctcgtcgacagacagcgtggaccagatgagcgacagcgagtcagaggacagcgagttcgagttcgacttgtaggttaaaaccaaacgtttgacaagcaaattaaatctctgcaattgaaccctttgggagactagaacaagttttaagtgacagattgagttttggtgaccaagacagtttaggtgaccaagacagtttaggtgaccaagacagtttaggtgaccaagacagtttaggtgaccaagacagtttaggtgaccggtatatttttggtgaccgaggaaggtttggtgaccaggtgatcgatagcagttatgtgactaatgaagacttagtgctctaccaaaattaaaaacatactacgtggtggaagtcagaagcagacttatcatgtaacggttcaagttgctggtgcaacaatgcactcttacactccccctttctagttggtaactggcttacgtgtcttcgcacaagataaattgtaagttcaacgctcgcgaagccagtagcggtcgaccttgaataggctccgccagtggtagcgcttcagtcgcttcacttgcagtcggttgctgctgcttcttcttctgtttcttggtcggtggtgtggatttcgtctttttaatttgtcgattgaattgtttctccgtcttatcctcccctccaggacgtgaaagcctcttagccttccttccgacgaagatgtggcagcaagtcctgaacttggcgtagaatttgcagccacaaatgcacttctcgacgtctacaattcatccatcatcaggcatcgagtcgtagtgtgcataccacaacgaccgagtcactacattattgtacagccgggcagcacgagcccgctgctctcgaacaagaagagctggtcccacgcaaagctcttcttcgccgtcatcgcttaattccgttgaagcgtaaaatgggctgtcaagcatgagcgagagatcctctagcttctatgtttctgtctcgtccactttcggtaactgttttacacggcagagcgtagggttgtcagcagcgtaggccacaatacgtcctgttgcaatcatcgaagctgccgctttagcagcggctgtggtgggagcgtgcaccttcgtgtccgctgttggcgtatggacctttgcgtcttgtatcactgtcatagtcacagcaagaagccgctgcataaaaaatctgcgccgcccggtgtacttcttcaaaatagcgttaaatgtttcacagggattgtttgtcgtcgcatagccaacaggtgtatggaaaacttgccaccgccaataacgactgtcgagccattgccctttgaagtacttcgtaaattttgtcagctccggaatctttttccactccttcagtgtttcatctttctgcgcataataggccgtcatgcttgccgcataatggattttcacaatgccatccattaccgctcttcggtgctctaactgcatatgctttgtacgtttccgaacattgtacagcacatggaagaagcacatgaagtaggtagccgagtcaaagggagcaatttgctgaaacccgttcagttgagcatcctctggatcccccatcacggcttcaatgtgaagggtagccgacgctcgcacaagttttaccattcggacaaacgcgctaagacacatcgcgtactccttagctgtgcgacggctcacaataaaaattgcggcaagctggtacaatcgggaagagtctgaaaatccacacgtgatcaaagagtaccccaagtcactaagcttgaatgtagcgtccgcgtggaagagagtaaatcggcctggtgatgcgtattcgatggaggcatgggccagcgctaggcttgttacgccgacgacgaacgagtcctcgtccgtgcccttgcctacgtaggcatgcccgttttcatcttcccgttgcccgaaacagaaagaccggttgagatctccggttgggtcatacgcgttttcccgaactagtttgcgtacgacctgaatggaattcttcgttccctataagcggcgtaagtatttggcgcagttggtgacttggctcaaagtagggtaccctctcttgggctcgagaatatcagaagaccggcgcatactacttaaaattagctgcgggggcactgcacactcatcttgctgcaaaatgaacttcttcatttgggcagttataactgctttgtggggaccttcgcactctagctgaatgtccctcgcgtgagcgactcggttgtgaaatacttggcacgccttggtggactcacacagccaaatcttcataacgaacttgcatttgccgtacaacttgcatgttttgcttccacaccgcattcggcgctcattcatcgagtgttcaacactaccgcaaactcggcatcgacgggatgggtccgtgtgacctacccgagcgcaacaaagctcaatatccaaaaattcttgcagtgcgtcttctgagtccaaagtacacaggttcacccagttgtacgaagggcgtttcatcccttggttcggcgtcttcactcgtcaccatccttccactggccacctgtcctccagccgtcgtcactcctccactcgtcaccacacccccactcgtcaccacaccttcactcgtcaccacacctccgctcgtcactacaccgtccctcgtcaccactcctccgctcgtcaccacaccgtccctcgtcaccataccgtccctcgtcaccactcaccacaccgtccctcctccactcgtcactacacctctgtttactacacacctctctgccactccgtccctcgtccctcctccacgcacaactaagtcttcactcggcagctcgtcacctacaccaccaagcttaacggggcgggttcgagaaagagtggccacagctcgatagaaggtcacactactttagggaatgtctaccttatactagctgctgtacgattttaatgtaaaccaccctatattagcatactatctgtgcctttctcgcgaagatctgtggattccaaccatgtcaccagtttgtctgtgcgaattccacattatctgtgcaggtaccaatatgtatgtgtggttcacctgcattgtctgtgcaattctaccgttctccgtacaaccgattgcgtaataatgagccacaaagaaatgcgcaccggttgtacggtgacaaatggtccagactaaacaaaaagcgggatgagctatacatgtacagctagtagctccagaacatacaaacattgacaaatggccctagcgttcaatcacactgaaataaaaagtggtctacatctctcaatcaatttacggccttctcgcgcgtgcatttctttcatcacaacgctaaatctgccgccctcaagatcactgaacaagcattgcagaaaacttcggcttcctttgcgtcctcgtgcacatccacgcccagccgctgaacagccaagcgaccatgctttacactcttcgtggtggtgtctgtggctcgaccgatgcgtgctgcagagggaccatgtcattatcgcgggggttacggagccatgggtacaagcaagcccctgctgagtggactaaagtatgtgtgcgtgtgggaaagtcaatgatggccatcgtacatgcccagaagggtacgatacgagcgaagagcagtaggcctaccaatgtggcggcgtcaggcacgggtacggcatcgctggttcgcgctttttatcctgtccctgacctcaagtcggccaccaatacgccctcgcgtaaccaagagcgtggtgtagtgtttgctattgtggatcgaaaagaaacacaattcggaattaagtacctggtcaagtggtgtgacgaagctgatgggtttcggtgggatgacacatgggagtatggtgtaggacttcgtgagcacggctttgatcgtgcgtgcaatgtggtggacgagtggaatgtgtccaaagtgtctacatactacattttgcaagctaaatggacattgtcaccacattggagcatcacccgaaggcttatgtgcgttttacgcgctaggtattgtgaatgagctggtgggtaacgccggttggcactccatggatcaagctcgtcaatttatgagggaatgtgcaggaaggggtaaaccgatttcgaccgagggggtgacgtatggtgaattgcgctgctacgtgaagtttgcgaactctaggaatctgtagcaagtgagcacgcagcctttggataaaaacttgttcggggtgtgaccggccacccatcgtcaagtaaattgtgcgcagttgtgctcgaagatggtgtctatatctgtgctgcttttagttcactgtgagtgacacactcttttattattgctgttgtggatgggaagaaattcatctacgacgacgtgatcactggtgttggtatcggacagtgcggttaaagctggatttatggtgtgtcgtttgtgcgccctgtggacatatacgtacgctaatttattgcacgagttctgtcgagtttctcttaaattctgaacgcagtcgtatacatgtgtttgctttgcttattcatttagggtttcctgaacaatcagagcggtagatgcaagaggcggtctgcccgttaacccaggcacggcatttccacttgttgatgcagccttggcccgaggtttctggtttttcgatgagcgctttttgcttgatcttttcggtaccttggcgcagctacgcttagtattgtactttctagtcacccgacttaccagtttttcgattttgtttggtgcaaaattgatgataccatacttttgctgagcagtaaccaggtgtgcacatacccgaaatttgccaaagtaccggcttccacaaactttgagcttgagatctactagtcacccctctgttggcattcccaattgatgtgagcgacggagagaccattttgtggtgaggtcattcaggtccttctccttgatacgtagttcctcttcttgttcttcagaatcctcgtttgggtttgtatgagctcatcagtagtatgttccgtgctaggatcctgttcattcgagaccgcctcgggctcaccccctcggggctcaccgcccgatgtcagagtatggaataaagccatggcgctagtgattcgaggcgcgacctctgacgcaccctcaacggttggtgaatccacctagtcaaacgataacctaaagtggcattccgcctcatcaactttgctagcgctggacgtgacatcaactttttcgagaacccgtatcagatttgggtccgacgtgcgctcaaattgtacgcgggaagcttccgccattgtgattgctgcattcacaacgtctgtagtcggcttaggtgtgtaatccggcttagccggttccaaaggggtgatggacgccgctgtaagaaaagctttgtggcgccgttcaggttctcacatggattgttggtggacgcatatccagcgggggtgtgatatgcctgccacatccagtaccgacccttgagccattgcgagtcgaaatacgtcgcgaattctttcagatgcgtggtccccttccatttctgcagctcacgatctcgacacagctcaaagtccagcaaaccggtggtcaacgatcgatgacatcaccatcattcttgttttgatcggtagatgctggattcgcttccgcacattgtacaacacatggaagaagcacataagctttttagcatccgcgaacaccaaaacagactctactgcgttgtattgggagtcttccgcgtcccccatggctgtgtccacttggagagagaccccacgcacttcacgtataaactcgacgaagctgcggaaatactcggtgtattcgtgcgctgtttgccgactgacaacgaagaaggcccccacttgataggctctggccttgtccgtaaatccacacgtcaccactgggtgccctatctcacttaacttaaaagtggcgtctgcgtgaaactggcaattcgacccggaatttgcaaaccgcacatagccattaatcatcactaatgatgttatgccaataatgaaaggatcttcatccgaccccgacccaacgtatgcgtacccttcgctgtctaagctcgcgccaaactaaaaggccatgtctgcgtttaggtccgggcggtaacagcgaatatgaacgagatcttggacagctttgtgcgagttcttcgtcccttggtctctccgaaggcacttcaacgcgttttgcacttgcttcaggcttgaccaaccacgactagtcactggggtctgggattgctttttcaaattgaccagcatgagtcatgatggaataccaatctcgtcttgttctgcaagaaattgcttcatcatcgtcgtcacgcgtgcatggtggatggtactgcatggaaccacaccacgcatgtgcccatgctcattcacccatatcgtccaggtatcgctagccgtacaggtgaacactttccacacaacagcacaaacccctatgtcgctgcaggtcttgcttgtacacgtaatgcgtctctcagtcactgcatgcatacccccccccacacatacgctgcatacgtcaaagtcgcgcttaagtgtcaccgccgagcagcacatatcatcatctcgataggccttaaagctgtcttcggaggcctggactgaaagccgccgccatggctggaagttagttgtttgttcttgtgacttcagttgtgtgggggctacgtatagtcgttggtttcaaaaggattccccaaaactacagcacgagtatgtttagatattggcaagatttatttgttcagccatgccaaagtacgccggtcagcttgtatatcgataccccgctcgtaagttctgtacccaatctacatgatatgtatgacgcagcccatctgatatggaatgccccaagtctgtatgttttgtcctgaaaatctgtatattttgacaccctcgtcttgtacggtacatcatacctctgtaagcggggtgaacgggtgtacgccgggaattggagggaattcacaaggcagtgcaaatttcttgacgtagctgctttgtatagcaagctgcatcaattgcttggtcggttttgcggtcctccgctgtctaatgtcctgttgatcgattttgataacctggcattttcctttagtgcactactacacatttgccgagccctggaactctcggttaatcttacctccgcacaaaagttcgctgaaaatagttgtgcttttgaaaacgaataacggtaggcaattgggtagcaacacgacaacaggaataaagtttatttctcagcgctttagcaacacttgcattagcaatcctttcgtatccccgagttgacgtgtattgcgcctttagtctttgtgccgctttttgtttaagattgaggctctgtacttgcaagaggttggatcagtgcttattttattaatgtcttagggaaacctaacgagataccccttcgaaaactatttcatgagacgcccttcacggccagcactaaccatatgcccctcatttaaaattcgcctcataggaatgacatacaaagaaccactgaaagtggtgagaacgtaggcagcacactttatctctctgctggagattatacctctccttcactttcataaagagctcggtagagcatttttttttaccatcaggtttgagtcaggtttgacatcaatatgacctttccgtgacttccttttcgagttgtcagctctctctctctctctgtctctctctctctcgctctctctctctctctctcggacataatgattcctgtgatgagcgctggtagtggcagcactcgagttggcgatgtggtcttgcagtagcggttgaaactctcgagacgctccaccgagtacgatccctggcgacccacttgaacttagttccatctctcttcgagacgctgccaccaccgctgtttcgaagatgatgctaccgggttaccggctgaagatactagaacattcatcggggctcgttctcttttcttttgcaaattgcagttgtcccatggcctgacagtatactggctatgaatactacatgtatatttggggcgaagcccccctataatgaaatcgctctgttttatggctttgatttgctttctttcgatgaatttatggctagggctagggaaaggtttaatggttgcctctcccgggagcaaaaatgcagcaatttacctctgtataagatcctttcagactcaatgtccaacggttccgagtgactattcatcgcaggtcagggacttaccctccagaaaagggtgcgaaagccattaaactgaggccagtcttttaggaggccacttccaaatagggtatctatgggctgtgagccttcttaagtggatttggcttaaaaccgcattattttagctaaatgggttctgaactattgaccctgctttagcgtcgtattgcacggatatcggggtaagtgcacttgttgaaggtctacttagaatagctctgctgcttagctattgctattgcatgccgcaggttgcttgccgtcgcctcacgcattcgacacgcctccaggaccgcccttggatgcggccaggtcgattggtacactggcagcaggacacacgggcacagagtaagaggcaccggcgacggcgtggatttgggcgggcgcctgacacacccttaggacgaccgcgctcacgagcgctctgcgtagacccccctccctcctagccatgcgcggcagccgccgcgcctctggctacctcggctccaccttcggctcagacgccgtgctgttgcagcaaaacgcgggcacgtgacgtgctgcaggagctgcaggcgccaatccgttcgccaccattacccacggcggtagcaaggaagctgagcagagctcaagcggtggcgtgcgcgcgctacgagcatgtgcatgtgcatgtcatgcacatgcactgcatgatccatgcgcgctggctgacaagcatgatggcgagctcgtgatggcatggacaaggactacgccggccacgggtcaccacggtagaccacccgcacaagcagttccccaccatgtattatatacctggacttcagtgcccaataggctgaagcacaacagacgcttcgacacgcagccgttcgccaccgtcttcgtgctcacagaccccatatactgggacgcagtgctgccgatcgtcatggacatcttgtgctcgtcctaggggctgctgttcctgtacacgataaagaatgacagcaacgatgagcgtgagaacatcccgttggactcggcgtgattaggcttccgttgtactcggcgtgtccacttgccttgctacgctacggatcgtacctcgccattgacccacaaagaaaatcgtactactcctcagtcttgaagtgtcgatgcaagtaacagcggtaggcaacgaattgtattgtggttgggcgtaaaaagcatttctaaataattaatgctacacaacagtcgtattgtcaatacgactgttgtgtaagcacaatacggtattgtgctattgcgtgctactgcacgccgtatgaatcgaattgttaacgactaaataggtttacgcatcattatctcaagtttcacagcgttatctaaggtcccatttgtgagaaatcggacccagtaactggatcattagtcaaaattacgaaaattatacatgtagcaaccacgcaacatcgctaatgaaggtaatactggggatgcttaacggatactctgtaatgcattagttctattagactttgagttatggagcgacaaggaggctggcagcaatcattcttgctgcgttcacaattgttgcagtttgtgtctattgtgttcttgacttactatcattgtgccttgcatgctttctgtctaaacaacgacgtaattcgttgttttagcaaatcatggtgattagcccatcattgagttaggaggctaactcgtcgatttaatcgcatgccaaagttcgtgcaaagcacaatatctgcagcgttatttcacgttaaacaccgattgccgccgacaaaccggaatcgtggtgtgcggaaactcatacaattataatctggtacggattcactagaaacatgagaagttcccggctaaaagtgctgataagttcccggcaaaaatgctgatacatgtctttttgatgtatactgcgttgttagtggtgtggtcgacttgagatgaatagtatcaatacatgcatccgtattgatcgaaagttggccactacagccaccttccgagtcgtggacggctaactgggtgttttggattcgcttgggcttaaccaacctcgcgatgggctttgctggcacgtctcagcccacactgcttgttcctgaactgattctacggtttggaagaatttgatgctatgtgtcggtacgatcaccgcctatgtggggacctttctactaggagctaacgttgttgggtttccgatcccatttacgtggtatatcggaggggttttcatgccaatgttcgtcccggtaatgctgctcttgatttttgggcgtaaaacgtttaaaagctcgtcgccttgtcgtccgaatctgttgcgattccttggatatttccacgcgttcatggcactgatccacatattcccgttctgcaaagttctatttgattttgtgccagtggcgtatcgaggattcatcgctgtagtcttgccggtttggagactcgctgcgaaacactatggtgcggtctactcgagagatggaagactttatccctggaatcgtcgcgatgacagtggactacttcagcgcgttattcgtctgcgtgggcatatccgtgaccggatctatctacctttcgctgctgttcatcgctgagacctgatgcaatcggtgctagaattccgtgaggtacgaatgaatgcaaacacggttttcgacctacttcgcgacctcaagaaaaatgtttgtaagcatgagggaactaccgattaatttagtggggttggacctatcggtgactcgagatccaaaagcatttggcgtagtttctcttagaggtatacggctggaagctagctaccctcatcgcgttgcaagagagcagacagaaaagctccgggtactgcaagaaatgtatagtgagtctgaaacttcctcacctactcgatcaaagaagaatcacacacgacgtgaacggccacctcaacgaatgcgagttcaaagagcaaggattaagcccaatactctaacaccaggcgataccaccgatccgatttttaccgctactcccccgagatcaagcgaaaaggctagtccttcaaggcttgcagctgatgttccattgcgagtacctgatattggtcgagtacgtcgagtgtatctttccgctaatgtacgtgctgtacaaaaccgttcttcagtacctaccgaatgtcgtgtactatccggaaggggccgggcactttggagcagccgcagcagcgaatattttggtgtatgctggtcttgaggtcgtctccttactactgcttcatatatttctccaacgcaagttcgccttctcgcctatgtaccaacttgcattcgtgcttgagacgcaagtctatatggtcgaagcccagcttttcatcgaaagtgtctccctactacagtacgagctcgcacactacggtaagccatccacctcagcatttacgctcgcagtatatagtccttactgtctttgcttgtttgagcagcaccgacttcacgtttcaattcaaatggctcttcgaaaccaagtagttgggcttcaatatctgctgcgagttgttacgtgacgacattgcttcgaatgaatttgacgacccagctctcagaagtagcccggcaagcctgccagttcacggtgtggaataaactaccggtaggatcaaacaaaatagcactaagctttcgtgactattgtcagctaataaattcttagtaagaatgggttcaggtttgaacgagtgttgatagaaatccatatccagctagcagcccgtccggtttcaactatagaaatgctccagtaaaccaactcaaatacactcgctcttatcactcctacactattagtattggagcttggcctgcacttcaccgaattgcagagatcttggcagtgagttgtcctttgatcggcagcgcgtacgagatggttgattacccggcggcgtagccgtcggggaatctgtttttccagatcgacgagtttttacacacacggctcgagaaccagtaatctcgagccacaacagcgcgacggagccaaggaacgcagccacagtcgctcagtttgattttagcgtagaactaaccctccacgccactcccaggcacgagcagcaatacactacggtgattcccccacgagaagatctttggaaatggcgtacgtcacgtcctccggccgctccaactccacacggtacttgctcagcagagatgcgacgatcagcttcatctccagcatggcgaggttcttgccgaggcacagacgcggtcctgcgttgaatgccacaaacttgaacgccaaggcggagatcaatttgccagcctgcgcgtcaatccagcgctcaggcttgaactcagcggcgtcggggccccagaaatgcgtcattctccccagagcatacatgggcagggcagccaccgtccctgcagcgataaatgtgccgtccgacagcaccgtgtcatgaaccgcttctttgttgacaatggggacagacggatacaacctcagcgtctccctcaacgcagcctcgacgtacgtgagctcactcacttcatccatcgagggactgcagtctccactgaaaagtcttggcagcttagcccgtaactccttgcggatcttggtctccacttgagggttgtgactgaggcagtagaagaaccagctcaacgcctgcgccgtcgtatctcgcccagcgataatgaagttgacgacgatgtctcgcaggtacgtggggtcgaagcagctttcgtctgcatcgcccgacctgttcaagtcatccaggaacagcgacacgatgtccatccccgctttatcgttctcccccttagctcgattctgaagattctgggccacgatgtcgaagatggtggagtggatcacgtgcagctctcgttgcagttgtccctcagcgccgacccccatcatccgttgggccttccagaaccaactgggtcggacgaagcgcagaaccaaaagctgttgactctgatcgaacgcagtctggaacggatgctccttgtccgagtccagccagttcatgtgcacgccaaagccgatctccgtgaacgcctccatcgtgaagcggttgagcagccggaacaggtccaaagtgtcgtcggtctcggctgctcgattgaagatgcggtccagaaccaccaggtgacgctggatggtgctcgtcatggagtccctcagagcccgcatcgtgaacaggttgctcgcggtcttgcgttgacggtaccatttctcattgtccacagcgaagatcccctctcggagcagctcgcacaggtactcggacttcttggggcccttggggaagttgtcgaactggttcttgaacacgtcttcgaatgcctgaggggtcgacagcagtgtcgtgtcaggggtccccaaggactgcagcagcacgggttcaccttgagcatcttggcagagactcgtcagccagtcacaacggataggaaggttcttaatcacgtccagcgtgttgcccagcaccggtagagtcgttgccggacgaaccaccttgcgagttgatagctgagacttgtccttgtcaacgtgcagcagtcgtcaggccagtgggagcacgacaagtccactcaacgctgcgactgcgacgctggacgagagcttgtcggtcatgcggtcgaccgttagcatcttgacggcttgagacttggagcggggaaaaccgggaatggccagcacccgacgggtcccagcacgacaacatcctataaggatacctaggttttggtaacggtggaagaacccatggatcttgaatggcttgttgccacctaatggtaagggtgaaccctggtacaacctatgaaggaagggtggatggatttctgtggatacctacatacggttggcaatgcttagcctctgatgatgcctctaggcatctgcaggctttgaaatctgcgatatcttggcaatgagagcaggcctgcagcaacgaggacagaacgtaggccacgttctccgggttgagcattttgatgtagaacttgccctgccactcctagcccaacctctagcattacactcagacatctgcgttaagctatggcttcctttccactctcatcgagcgcgcactgtccaagctaacagatacgctactggttgttgtggagccatttgaattggaacgtgaagtcggcgcctggtaatacaatgccatcaacaattcaggtgagagacctcagtaggcaaggctttggttgtggtcttaccgtaatgctcgagcccgtactgcagcacgaaaaagctttcgataaaaaattgggcttggaccatgttgatttgagtctccagcacgaccgcaagttgatacaacttgcgttgaaggaatgtgcagcaggaacagcgaaataatctccagggcagcgaacacgaaagtgttccccgccgcggctagtccaaaatgcccggctccgccagggtagtacaccacattcggtagatgttgaagaaccagtttgtacagcatgtacatgagcggaacgatacactcgacgtactcaaccaatatcaggtactcacaatggaacattaactgtaggccctgtagaaccagtattttcgaacttgcgctgaatgctccatcattcgtcggagttttaagggaagtgtgaacagcggggcttcgtcatttattgctccgtcagtaggaccggcatctaaactaccggtcgttagtacgattgtcgcgctttgagcatgttttacccgtgtatgagccaatcgggacgccggctttgatcgttttggaactgacaaaccgtcaaactcgccattcatgtcttgtagcacacggagcttctcggagtgctcttttgcgatacgatgaggtatgcccgtactcccctaaaagtatgcggaaagctttcggatctcgggtcacagataggattaaatccaccaagttccaactaccgatgagtgtttgagatctggaggaggtcttcttcaaatcttgaaggagatcgagagccgtgtcggcgttcatgcgaacttcgcgaaattctagcaccgactgggctatgaacaaggccgacaggtacattgaacctgaggtcgacatgcacaccgatgagaacagcgcgccaaagaagtctacggtcatggccagccacgattcccgggataaagtcttccatctctcgaattgagcccaccatgtatcattttacagcgaatctccagactggtaacaccacaactaccagacctcaatatccaccggcacaaatccgtactagtagtacaactttgtaaagctgaaatatgttgcctagagccatgaaggcttggaagtagcgaaagaaccgcaccatattcggacgagaaggcgacgcactcgaaagagaacctcgaccgataactatgagcatcatgattggggtatacagtgcgacgaggatccctccggcataccaagtcaaggggaacggaaacccaacagcatctactccaagcacaaaggtccccaagtagccgcagattacaccagtgcacaaaagtaatcgctttaacagcgtggcattcagctctggaaccagcacgacgccagcacacaacatgatgaagttcgccaaggtcaagcgaatccaaaacatcccgttggtattccatgactcggacggtggtcgcagtggtaaactctcgatcaatacggttgtcaagagtgcaggcactggcgtcagaacgcaaaccaacaagactcgagttggcgatgttgcgccgccaatcgagtacttgcctgcttggaaatcacatttataggtcatcctttgggtcgctctccaggcagacttccttcgttggcaaagtgacttccttggataactcgtattgttggagaatggctatcctggacggtggatggactagggggttacgaaaagctgatcagaacatcatggtcaaagcacacaatcctcgatctcatgtgattcaacgtgatgcgacgacgcgtcctggccaagaacaacaatgctactacagtagtacagcagctaaggactccttagaagctccttagtaaggagctcccatttccggagctcccatacacaaaaaggccaaccatatgcatgtgtaactccatgggccagcacttcgagctaaactaaagatcgaagaggactatgagcatgcaattgaatatctgtgctgtctagttagctagccatcgcaggccagtaaccccatctttgggcgcggtatggacggtgttggtcgcccatgaactcgtctgaaaacgccatcgcaagcgatctgctcgcgctgatgtacaacaatttgttcgctttcgcccacaaatcgtgtttttgtttcaaacgctgatgatccttacggcaacgtagtacgtgtcgtcggcgcgaagttgcatcaagctctctcctaaatctctagcgagtgtcatagttttgcttggcgcgttcaacgctcaccactgcagtgaattttggaagactgtgagcaagtacaggtgtgcccacgcgacaacgagtcgactataactttgctgcatactggtcgcatgtactacgcagtataacggagcaaccgttgtcatgtatatacctctaaaggtgagagccgaagccacgcatgtactctccgaattaaacggtattgtccaagacttgtagattgcgcagttagtctcgttggtgctctagcagtaccaccaactccttttgagaagtattttcaaacttgacgctcgtgtttatcttgcaggagtcgtcttagaagttaccttacgatacattatttttttaaatgtatttttttaaagtaaccaagttatccacgttttgatgccttgaactcttaacacctgcattagactgctacttggtcaatttgttgttgtccctgaaccagcacattgcgtcgagcgtgctaccgacagagtaactgacctctaggaacaccgtgccggtagcttccctgtatgcgaactcgtgatcggtgagggttacacaggaaatcgatccgtcgtcaagtatatgtaccggtagtgaactcatctttgctagggcccacgcgtagtggcagtagagtgttcatgcgagccaaaactttggtgacatcgtgcccgactccgtcgcttcgagcaacaagtaatggtcagcggagagcatcgatgacggtgacgacgccaagatgcacctgtccactacgacctgaagtcgaagacctgcgaggagtggcactgaccctaacgagcgtgtccctcacgttgcctccatcggcagcgacagcacgctcgttatgtcccattgctataaaaactataatggttatactagtcctcctcgatctttagtttagcttgaagtgctggcacatggagttacacatgcatgtggttggcctgtttgtgtatgggagctccggaaatgggagctccttagctgctccctactacaattaccactagtagtaattgtagatgccttggctttctattcgacatacgggcctatagcatgtaggaaaggaaacgttgttttgcctcccacatactttattttagcttacaagtggtgtgctcaacgttccaagcctggtttactgttaatcctcttgaactaattagctttgccagaacttcgggccacttctgactcagaagcggcttctgtttatgagtctaggcacctgcaggctccgcaatctgcgagaccttgacggtcagagcgcccttcaccggcagcgtcaacgacacatcgtacgtcacgttttccgggttgagcacttcgatgtggaacttgctcagcagacctgccaccaccagcttcatctccagcatggccaagttcatccccagacacatgcgagggccggcgttgaaagacgcaaacttgtaggcggagaccgcgatcagtttccaggtgctggggtcgatccaccgctcaggcttgaactcctcagcgtccggtccccagacctgcggcattcttcccatggcgtagtttgctagcgcaatggctgacccagcagggacgaaagtcccgtcggagagcgtcgtgtcctttagagtctgctttggttcaacaggaacggacgggtgcaggcgcagtgtctctttcaatgcagcctcgaggtacaccagctgactcacatcctgcattgaaggggtggcagcctccgctttaacctttggtagtcgctgcgccagctcgttccggattgcagcctccactcgagggttcttggagatgttgaagaagaaccagctgagagcctgcgctgtcgtgtctcgcccggcgatgaggaagttgactacaatatcgcgcagatacttggggtcgaactgcttttcgttggagcttccagcgctatcaaggaacagcgacacgatatcgccaccagccttcttctccgggttttccacgcgacttgatcgtcgtgccaaggccttctccacgatctccagcacggttttgtcaatcacttggatatcccgctggagctgcccttcgactcccagacccagccacctctgggtcttccagaaccacccggggcgggtgaagcggaagcgcagagctcgctgcgcacggtcgaaggctgtcgcgaatgggtgctcctcctccgagtccagacaccccatgtggaccccgaagccgatctccgtgaacgcctcgattgtgaaccggttcaagagcttgaacagatccagagtctccttgctctcactcgcacgccggaggatgtcgtagagcacgacagcgtgacgttggatgacgacggtcatggagtccctcagtgctctcatggtgaagaggttgctggccgtcttgcgttggtgcacccactgctccccatcgacagcaaagatcccgtcgcccattagatcccgcaggttctcgcgcatgaaggggcccttgccgaagttactgaactgggtcttgagcacgtcctcgaacccctcgggggtgtagagaatgaggttgaggggaataccgagggcttggaggagaacgggctcagcgttgaactgcttgcctatttggaccatgaagtcgtgcatgtcgcctctgaccccgtggatgacgaggtcccacgtgttccccaggaatggcagtgtcgaggctggtcggtggatcttgccaatgccttcttcgctcttcttgtgtcttgagtggagtgtgatgacgaggggcagcaccagtagccccgtaagggctaaacctgccacgggggacttctcgacgagttgaaggatcggcagcatcttcacgtggatggcacagcggccacttgagcccaacgtgggatttttgattatgaacaagcgctcgcgacgagtcccacaagttgaagttggtggggatgagctactgcgatgatggcaacggagacctgccgtgaacgaaggagacggtcattcctactaacggatccagcgcgaccttacgtccatctttgactgtattgtagaagtagctggtggtgatacgtcttgcggatagctgcgattcttagttccacgcgattcgagaggccttcaagctgctctcggacgccgcgtgcactcttcaaggtctcgtagagtagatggtcttgccgtcatagatatgtatgaaagcgcgagttattaggtgcagaggtgaacctacagattacagaagatttagccttagccgatgctttcgctctgatcttgatcaatttccagtcagatgataacgcagctaatattatggtgggaattcgccagcattgagctaaagatgattgaagagtatggctactgttctcgtagagccatttgaattggaaggtgaagtccgtgcctggtgtttcaaagtcaaaatcaaaacaggacacaggaaatcttaggttttggaggattccgtcaggtttggcgtgaagttgtgagcgtaccgtagtgtgcgagctcgtactgcagcaggaagatactttcgatgaaaagtcgagtttgaaccatgtagacttgcgtctccagcacgaaggcaagttggtacaggggagagaaggcaaacttaagacgtggaagagtaataacgtcacgatctccagaccggcgtacacgagaacatttgccaccgccgctgctccgatttgtccggctccgccaggatagtacaccacatttggcaaatgctcaagaatcgttttgtaaattacgtacatgatcggaacgatgcactcgacgacgtactcgaccagtatcaggtattcgcaatggaacatcagctggagtccctggataactacgttttgcgagacctgaggcggcagtggcgatgggtgtagcctcagaaacttgtaaatcgtaggggtcagcatcagcttctttgcaggtaatagtactgctttctggaggtgttgttgcaattcttgccctttgaatctgaaagcatcgaagtggcgttgatctttttggcgaggtggcgtcggacggttgatatgcttgggttgcttgtaatttcgcaagattttcagcttgccctctcgcaagaggatgggggtagcaagcgcgtagccgtatcccctcgaatgaggcaacgtgaaagccgttcggatctcgagccacggacaggataagcgtcggcagattgcacgtgtcgggatttttcattatttttccgtacgaagacgactttttcttgagatcgccaaggagttcgaaaacacttgttgcgttcgttcgcaggtcacgaaattctagtgccgattgtccgagatccgcgacgataaacaacgctgaaaggtaaaatgatcctgaggacgacatgcaacccgatacaaacaacgcgctgaaaaaaatccacggtcatagcaacgatttcagggataaagtcttccatcccacggatgcagctcaccatatattctttggcagcaaacctccagactgggagcaccaaaaccacaagacctcgatatgatacaggcacgaatccgtagagaagtttgtagaagggggaaatggtggtctgtgccatgaaccctcgaaagcagctaaagaagcgctcgagattgggacggcaaggcaacgaaccagaaaaagtgttccggccaaaaacaaatagcatcgtcgttgggatgtaaagtgccacgaagagcctcccaatgtacaaggtaaatgggactggaaagccaacaccggctgctcccagcacgaaacttgccacgtatcccccagtcgtaaccacgcacaatatcaatctcctacgagatgttggcttcaattcgggaacaagagggacgagcagcgacataccggcaaagttcatcacgaagtttgccaagcccaagcgaatccagtacacccaattagcggtccaggattcagaaggaggtctcagaggcagactttcgagcaatacgggggccagaagtgcaggcagcggggtcagtatgcagaccagaagtactcgagctggcgatgtcgtcttgcagtaatggtcgaaactctcgagacgctccaccgagtacgacccctggtgacccacttggattcggttccatttcgcttcgaggcgctgtcaccaccgttctcgtgggtgtgtggagactgcgtcgtggtctcgcgatgggtcagccacgttcatcgagggttctgtttgtgaagtcgattgttttccggaacgaataaacaggatttcacaagcagagctattataagataaaatgtctccgtgtccttgtcttcctggtgttggtttgcatttgcaaaaatgttctaaatctatttttttacatggacgctatttagcgtgctaacacttccactgccccactgccgctctgcgagcatgtggtcgtactaaatatatgttatactagcggagcatcacggtcgctgcgctcatgttgctttaggggtctaagagaaagatatcgacatcaacacgaaagctgggacgaggacgctacagtaagttgaagatgctgaggtttagccacacgcggcttgatctcgaagagaaaaacgcgttcattccgagaaccgctggctgccactcaatacactcaagacgtgaaggctgttgcctccgtcacccctcagtgcctctccgtgctcttatgtcattgactgactgttaggttatgagcccaaaggtgtgcaggatggagggtcacaaggttgataccatccgctcgctcaagttcgacgggaagaacttccttgcgtacaaggaaggcctgaaggcggcgctgcgagctcgaaagtgctggaagatgaggagccgaaacccgagaaggacggcactgcagcgacgaagaagaagcgcacggagtggcggcagaagctgctgatgttgaacgacatcttgacgaacacgctggacgacgtgacgcgagtcaggctcgctcatctgaacaagcctcaagccaagtgggccgcactagttgatgatttcgaaaagaactctttcgcagtggcgttgttcaagcgaagagagctgctgaacgtggagtttgatcccgatagtgaatcaattcgggactatatccaccgagtagaggcaattcggcaggagctgacccttatgcacgaggaagtgtccgacaaggagatgattactgcttcgctgactggactgggggggaagtatgaaagtatggtcgaaacattcgacaacctggacgactattctctgcagcaagtaaaaatcaagctgacgagtcgtgaagaacgcctcaaccaggcaagagcggtgactgctgccaaggcccgcaagaaagggaatggccaggctgcaaataccggttcgcagatcgcacctgtgcagtcggacgataaggaagtgtcgttcgtcaacaagaagaaccgaggtcgtggaggtggtggtcgtggtcaagcccagcgacgtgctgacatcgactgctataactgtggcaagcccggacactatgcgtacgagtgcagagctccgaagcgagatcagcagcagggtggcaagaagaattcgggcaaatcgaagagtaagcgccaaaagcagcagagtgatgatgatacctgtggtgatcttcctggctactacaatccaagtaagtctggcggcaagaagaacaagcctgtgaacatgaccgaagtagtggaagagaagccgatgccgtgtttcgctaacgcgacggtgcaaaatgcatcgggtaccagttttttcatcccgtttgtgctggacaacgcatctgacgtgaatatatgtggatgcagagaggcatttgtgtctcttacgtcagattgtgacactgtgatgaagtggtttgataattcgacccgcaagaaagcacagatgcagggacagatcaagttcgcgatcgtggatgcgcacacgaagactcgagtgtggatcacagtggaagctctctatgtagaaggagcgacgaatctgctgtcgcagcgaatgctgtacaaggagtatggttttccgtgcagactagtgaggaccaggaggtgactacactgacgcaccgggtgaagcacattacctggacgtttgacatggtgggtgaactctatcaaacaatggtagaagtccagcgtccacaacctacgctggccgtattgcagacctctgctcagcctaccagaaagcttcggatgtggcatcatcgcctcgctcacgcgaactggcaggtgatcaaggacatgtcatcgaaggaaatggagagaggcttggagctgacgaaagaggaccgtagcgggaaagcgcaatttatcgattgtgatacggccaaaatgaagagaatgtccttcaagaagacgacaccagaacgtgcaaaggtgccgttcgtcaaagttctgatggatctgggctttctcagtgtccctacgttggagggtaacacagtgtacttgcacctcattgatgagggatcgaggtaccagtggttgtggagcagctgaagtgctttcgtgatgacgttcgcgctaggcaccacaaggtcgtgaatactttccactcggaccaggggcctgagtttttcaatcaagcggtggaagaacagtgtgctggcgaaaccatccagattttcgctcatccgcatacacctgaagaagtatgcctgattgaaaaagcgcacgacactctgatgaataaagttcgctctgtgttgtatagtagtggtcttcctggaatgttgtggggataagcagccaactatgtgatcgagacgggcaatcggacgagtacgaagggcaatgcagaccaggtgacgccacatgagaagatgttcggatcaaagccgagcgtgcgtcatctacgtccattttgctgtctagcgatcaagtttgtggacacggtctatcgtaaggacaaattgtcggtgagaggagcgcccgctctgatggtcgggtatgctacgaagacaaagggctacgggctgcttgacttggagtcgggtgtgataactgagcatcggcatgaaaacgtgaagttctacgaagagactacggtggagagatcgtatgtggagaaacttctcaatgaggcttatcgtttgcggaggcgccctactgtagactgtaaaaatctcccattggttcggtttccagtggttgatgtgaatgagttggatcgcaacgatcgtgacttagagctcaggcgtgagttggggatgcaagaaccgcctcctgcaacgaatacacctgaccaggaacagaagaattatgaacctggggacgcatcagattcagaagagagtcttgaagacaaacctccaccgccaagaaagaagcgccacttaccagttgaagtgaagaaaccgcgcagatcgacgcgtgctcggaagagaccgacacggctagatgactttatgtctcctgtattcggctcatcagcttctgcaacggcaactatgaatatccaagtcccgaaaacctggaatgagatgatggcttcggcgcaaagagagaagtggcttgaagccacgaaggaggatttctggctcagctggataatggaacttggatcctggtgccaaggcctaaagatgcgcatgtactgaagtgcaaatggttgtggacactgaaagagaatgaactgagaatgttgcggttcaaagctcgtttagttgtcttgggttgtttcgagatctggggaatagattttgatgagacgttcgcccctgttgtgagattcgagacgttgaggttcgtcttcttgtgggctgggaggaccaagtcggtggtgaagcagttcgacttcgtgactgccttcctaaatgcaccaactgaacggatcatctatatggagcaacctgagggttttgtgaagcgtggttacgagagttttgtgtgcctgttgaagaagagtatctatgggttacggcaatctcctcgtaactggaataacacgctgcatctcgtgctcatcgagtttggcttccaccagagctacaaggatgaaggactgtactggattcggattgagggcagacttgtcctactgccaatctatgtggatgatattctgcttgttggcaaggaagaggatgtggacttcgtagacaaggcgttgacggagcgcttcaagatgaagtgtctaggagacgtgaactacttgcttggactacaaataaagtacgagcctgagacgcatgtctcgttcgaagtacatccaggacatcatggcgaagttcaagatgggagtccgcgtatccggtacgcattccgatgacggtggacggggtcaagcttcacgaagctagcccggaggagcatgagaaatgtaagaagctgccgtaccgaagtattgtggggtgccaacagtatctggtgagcggttcgcgccctgaattgggtactgctgtgagaattttgagtaagttcctcaacacgtatggtgttgcgcattggcgcgcagcgaaacgagtactgcggtacttaatcggaagccaggacatgggattgcagtttgactacgaaaaggcacgccaatataacaagctacgcattgaggtctaatctgatgcaaactttgcgtcggaaggtggtgatatgaagtccttgagtggatttgctgtattctgcaagaacagctaatctccgcgagatgctggaagcaagagactctagctgagagtacttgtgaggccgagctgattgctgccaacactgggttacaacaccctatctggctagaacagctagtatgacaggctccgatgcggtggggcctgccgcagcgaaagtgcgtggagttgttgtggttgcttgcttgcttttgggtaaaatgcaaagtgagattgattcctttaagtcttcgggctagctacggctctaggtcttcctcttgctttctcgttagtgtcgttctagaagctgagctaacctatactaaatgcaagtgtttttctgtttttgtaatcctatatatgcatgtttgtatacttgtgcaggtagagttctggattccgggcgccaggcagtcttgcgcaagcctggtgccagccttcaagcgacgcggtgcgcaagctacttgtggcggaggaggaggcggcggcgctgcgacgcctgccttcctagccaccaggtatgtcttccttgagcatgtatgttgctggcgtacccgcttgcgtgggtgccagcagcagacatgctgcatcatgacatggtagatgagctgggcttggaacgagaaaccacgacgctgtattgtgattcggccagcgctcgtgaactgatgaagcatgctggaaagcatcgcaggaccaagcagctcaatattagtgacctcaagattcgtgagtacgtgaagaagcggggagtcaagattgaacccgtggcatcgaaagcgaacgcggctgacacaatgacgaaacctctacctctggaggtatttgaacggcacagagagaagctcggtgtgcgcacttcaagaatgatctctcgtcgggaaggccgagagtggcgtggttcaccgcagagccaagcacgaagagttcgggaggagacaagccccgaagccgacgagaccggcaaagacaatgttgttgagcagagtcgtggccgtcgaggaatcccagtccgcttcaagaagagagcccgagttaagatgaaactggagagagcgtgatcgtcacgatatgtggcatgaggatttgacagcaagggctgaagcagctggatgatggaaggccagatccgaccatgtgtgtattatgctcaatatgcatgtagactgaaaaaaatagtgtagtggcatacgaggcattgtggtgatatttactgtgtgaaactgatgagttgttaccatgatgtatgtagccaccaaactgagcgcctcggagttgacgtcgagaagagagtaagagaaagatatcgacatcaacacgaaagctgggacgaggacgctacagtaagttgaagatgctgaggtttagccacacgcggcttgatctcgaagagaaaaacgcgttcattccgagaaccgctggctgccactcaatacactcaagacgtgaaggctgttgcctccgtcacccctcagtgcctctccgtgctcttaagtcattgactgacagtttgggtcgacccccaaaactatgctgaccacagagttttggacgacgtccccacttgaggaatttgagtacaaagccgcttactctttatttcccctttcactctccccgatttgctggcgattttgcaaacaacataagtaccattcatacgttgttattaacggtagactgatacacctgacctgtggttcgaatgccagaatacttaggtaagtgtaagtgcagaatgtgcacattggcacaacgaaaagtgaataagaggttaactttcgatgtttcaatttcgtggtgtgttcattttcagaatgaaaatacgagcgaattattccagtaacctttcgcgatccatgttgaaattcttcctctagatgtcatctacacccagccgcaatggccaatgttgatgccgcgactatgacatgcacggctgttcaaagctgttagtctgcacgcgtaggtagataacctcatgcacgttgagcgcgataaggaaacatatataatgaacgataactagctcaaaataatgtagttgagcccgatatcgtaccatcacacatgcatgtagggtatcaaagcagagctgtgacgcccgatatcgacccaacagaactgtaattgagtgggctaatgcatttgcttagtcgaacatcttttcatgagcaacgcaatgaatgaattaacgcagactagaaaggagcaaataatcggcgcctttagcgcgcaggaaggacttggagctgtctgatttccttaaagcgaattagcaggcgagctcgaacgggccaaaagagagccattgttgctaccaagaagcaccgacacggaatccggctcgtacaccccagctcatcgtccagctcgtcatccgcgcatagccttcaatgtaatttagagaagttgctgctcgacagtacccggtccacagcatgcaaagctgcttgctacttggcgtagcgttggcgcttccttgaggctctgcttgttgatgcttggactctctgttgtgcgctggtcaagcgatcccgaagggccacagacttcttaccaacggccgcagagcgacccttcttacgacatcataaggtttgaaaggcaaatagccttaataaagggtcctaagcgggtccaaataagggtaaaatgtcacgtttaagtctatttctgatgtcctccatacggtgtttcataacttcgaccatctggttttatggcatctaaagatagtgacgtcggttcagctcagaatccgtgccgataccaccttctgataagcatccaaatgttgtttaaccgaggtatttttttcgtgtgagcgattataaattgtgaccctaacccattcgcagaattaatgtaaaaagtaaagcggagtgtatataagagacgtaaaaactccttaaaacggagtctcatgattataggggggacttcgtccccaactattaagtattttgtatggtaaggcatgtgtggcttcttgcattgttgctcggggtgttgtcgggttgatatcttatgatgaattcttttttaccagtattgggcttcagaaggctgcctatcatttcgttgaaggcgatgggctttactactcgtttcagtggagccatttgaactgaaaagtgaagtccatacctggagatgaagcaacaacagtaagtaagaatcgtgcgtcgggagtacgaggtcatgggcttaccaaagtggtcgagttcgtactgcagcaggaaaatgccttcgataaaaagttgggcttgcaccatgtagacttgcgtctccagtacgaacgcgagttggtacagaggcgaaaaggcaaacttgcgttgaagaaacaagtgaaccagtagtagcgacacaatctcaagaaaggcaaacaccagagtgtttgccacagcggaagccccaaaattgctggcgctactggggtagtacacagcgtttggtaggtgctcgagcacagatttgtaaagcacgaaaatgagcggaacgatgcactcaacgtactcgaccaataccaggtattcgcagtgaaacgtcagttgcaggccctgaaccaccagctttttcgctacatctccctgtgcgatacactttggactcgtgacgaaaacctgaacagtggtggggccagctcctttgccgctaatagtatcgatctctggcgctgatggtgtaatttgtgcccttcgaatctgaccagggcgaggtgctgctgaccttatagtcgatggttgatatatttgcgattgttgtagcgccagaagaatatcggattgctctcttgtgagaggatgagggcagcaagcggttagtcgtacgccctcgaacgagacgacgtggaaggcgtttggatctcgagccacggacaaaataagcgtcggtagattgcaattgtccggatttttcgctagtctgccacacctcgatgactttttcttgagatcttgcagtagctcaaaaacaatctttgcattcatgcgcacctcccgaaattctagtagcgattgcccaagatcagctgcgatgaacaacaccgaaaggtaaaccgatccagtggtcgacatgacagtcgagacgaatagagcactgaagaagtctaccgtcatggcgacgatcccggggataaagtcctccatgtcacggacagagcgcaccataaagcctttcgcagcgaatctccacaccggcaacacaacaactacaacacctcgatacgcaactggtatgaactcgtagaggactttgtagagagggaaaatgttgacgagcgccatgaccgcgttaaagtatcgaaagaagcgtagcagattgggacgacaagccgctgagctcgtaagattttgtcggccgaacacgagaaacattatgaatgggatgtaaactgataataaaaaccctccgaaataccacgtcatagggaacggaaacccgacaatgctagccccaagaagaagagttaccacatagccgatgcaggcgccagcacaagttgtgaatcgctttagaaccgtggggtttaactctggaccaagcacgacgagctgcgatacgccagcaaaactcattgcgaagttttccagtcccaagcggatccaatatacccaattagcactccacgactcggaaggagaacgtagtggcaaactttcgagcaacacagtcgtgagaagcacgggaagcggagtcagaatgcacaccaagaatactcgagttggcgatgtggtcttgcagtagtagtcgaaactttcgagacgctcgatcgagtaggatccccgacgaccaacttggaatctgttccaactctcttcaaggcgctgccaccagcgctcccttggaggcggtgacgttggaccatgggctgttgcgctcatcccgtcagcgcggccgaataatacggttatgaggactgaaaagatagagagatgatcgcggtgtattcatagcttgtgataatgttatgttgtgcccagcactacaaatatccccccctctgaccatgtgatcaaattattatttcatgacgcactctacttgcgaagctgcctccgtttctgagttgatttgctgccaagagccacttgaactggagcttgaagtccgcgcctggtagtgtatgatgaaatcagctcgattttttttactaagtaatgaaaaatgagagattaagtctggatgttggagttcatactgaagtacgaagattgatgttttggatgaaaagatgcgtttgaaccatactgattcgcgccttcagcacaaaagcgagtggatacagaggagagaaggcgaacatccgctgaaaaaaactgaggtgagaagcaagagaaaagaaaaaaaagcttcgataccaatgacttcaaataagctcaaaagccaaccttgctcgactatactacaccacaacactacagcataaaaaaagaagagaaaagaatcagcgtccactcgattcaaacaacaccaatccgtcaaagccaatacttacttgtttccggtagccgcccccgtcgccgccgctggttgcgagataatcgcagcagctgccggtgtcggcaattgcggctcgtacgtgacgtagctgcgcttgagcgtgagtccgttgcgtcgaatgaacttggtgacccagttctcggaggctttgaaggtcgagtcggagcgctggaacatgtgctgcgccgtcttggcgatccacttccttgtcacgcgctccttcttggctcgctctttaatcaccacgaccagtagcttctcctccgagtcctccaagtacagcttgcgtcctcccccgctgatgcgcttcttgctgccagagtcgcccagaatcttgtctcggttcttccaccatttgcggaaagaggacgcgctgacgtcccagttcagcgccgcaaagtgcttctcggcacgggacgggatccctttacccggacccattatccactcaatggcctctttcttcatactcaatgggatacttttccgtttcatggccgtcgtcgaactcgcctggtctggggccgcagcaggtacttggactaatgatggtgatggcgttgcagtggttataggtgttgtaggtgcactctccgttgtcgagtcggagagagggccaatggcggctgcagctgcagataacggcatcaggtccatgacattgctggcgctgtggtccactttcatggtcttggctggtgaaccgtcactactactggtattggtattaggagggacttcggcgtgggcttgagcttggttttgggcctgatttagcgcttgctgctcctggatctgcaggagcaggtgggtcatggccggatccaaagtcccatcgggtccggttgctgcatgtacgagtgccagcacttcctctgcggatggagccttcatcttggagcgctgtaggaggcgagaaaccgattagtagcccgccctcaaaacacgcaggaaaaataatgactgaaagtttgtataagtcagaaaaaggaaaaatacgaaatgaaatataaaggaagtattatttattttacggtagcgcaatacgttttcaataaaattcaataaatataagcattatttcctatgcaaaatagtgactttatattcaattatttcatgtagttagatttgtagatagaattgattaaaaaaacaaaaggaattattttattatgttctattgataatacattcagagcatctccaccggtgcagagtaaaactaaaagcaaattgccctcagatccgtgcctacaacggcacaaccgtgctaaagacagtgcgcagctccaccggccattgagacttgcagcgagcgcgttaaagctcttagcacggcgccagcaatggcgacggcgagtcctagctgtatagccctataaagatgaaaacgggtccgggaacacgttgaggaagacccagggatgacgtaacaagggcgacgctgcggtctgtaacgctagcgctgcttagaacgcttgacttggccctactactggctggtcgacatttactcaaccttttactcaaagcctcctccgtcggcaaacttgtacaaaaatttgatctgcgtaaaaaatggagcaatttgctcaccatttactcaaacccgtggagcagtacaaaactaaaactataaccaaatattgacagaaaaggggtaaaatttagttttactcacgaccggtggagatgctctaatatatatttacgaaatattattaaaacaaatatttaagtttaatggttttaaaatataatttgtttgttaaaattgtaattatttaatgaattgttttttattttgacatctttataaagtcaactaacatgtatgaatatatgtaaataaataacatacttcgaagtagtacattaaaatagttgtaattaattttaactatgtcgatcgttcgctagatcaagatggacaactcgctcgtgtcgttgaagtctgctaggttttatggagccactcgaatcgaaaactgaaattgtttcctaaatttactgcagcagcagtacgatctcaacgaaaagtatcgtttgtactgagtaaacgtgggtctcgagtacgaacgcaagctggtacagtggtgaaaaggcgaaccgccgctgtaggaagacggcgagaaagctgaatgacccgaactccatgagcgaaaatatgagaatgttgacgatggccccaaagtgccaattccttgggtagtaaacaacattggcagttgctctagcaccgacttgtacacaacataaattaatggggtgacacactcgatgtactccactaataccaggtattcacagtgaaaaagcagttgcagcccttgcagaactagttgcttcgacttctcggtagatttgttgctcttgcccgtcttagacttgggatctacagtaatcgtagatagactgtgtccagtgggagatggtacgaccaggatatttcacttagagagcggacctcttcgtttgtttcggtgcggttggctgagtatttggggtgctcgttgggtatagacactcgattcatctagcttccgaagttgtgccgcttgctggaccgtaattgtgtgtgcccgcaaccgcacgccctctagcgagcgtatattaaatgccacaggattccttgttatcgcaaggatcatcggcaatagactcggaatatcatcgctcgagccaacagcagcaacaaagtaccgcgaagctgctcgatctcgaaggagttctagcacaatatttgcattttctcgcacttcacggaactccaacatcgtctgcccaagatccgccgctatgaacaatgctgacaagtagactgatccagaagtcgacatacacacagcgacaaacaacgagctggaaaagtccaccgtgaacgccacgagttctggtaccaagtcttccagctcgcgcgtcttccagacgataaagcgtttagcagcaaggcgccacaatggcagcacgataaccactactcctcgatatgccacaggtacgtggtcataaagaactttgtaaatgggatacaccccgatgagaagcatgtgagcggagataacacgattgagtcgctcgaaatgctgtagatgcggagagtctttcgcgaatggggctggccctagcacgagacgcgtcatcactgtcatcgaaatgccaattggaatggctccaagctgcatctggagcggcacaggaaacccgatagtagcggcggcaaccaggcacgcaccaagataaccagcactcgagcctaaaactaccagaaatcgctccaagactgtaatctgaagaccgggtacaaatgcgatctgttgagtcgagccagcaaaacccattgccaagtgcattaacgctaagcgaatccaaaacatccagttggcagcccacccctcggacggcggtcggagtggtagggtttccagtggcagagctactaccagtgcgggtgctggagtaagcaagcatactgcgatcactcgagtccgtgacgctgtcttgcaatagtgatcgagactttccaggcgctcgacggagtacgaaccctgacggcctacttgaatcgcattccacatcttttcaaggcgatcccacagtgatacgaggcgagtcggggaaactgcaacgcttggtctgctgggcgtagcgctcgttcgtacctcagtttccttacttgtgggtcgacgctgcgggactgtggtggtgaaatagcaatataaaaatggatcacacaaccgatgacatgcctccacaaacttctggaaatagcaacaagtgaaggtcgatgactcatcggtgataaggccgtacgtaaaagcaacgtcatttgtcgatctagtaagatcaatacaagtacagtatctgctgttcgttcaaattgattcgtgcatgaatcgcgtcggtatatattgaacagtggcttccagacgttttctaaccatgcttgttgtggagccaatcgaagcggaacgtaaagtcgacgcctatgggggatgcaaacagttgtccgttagtgtaagcagatccacaactaacgagaagaatatagcagctcacctaaatggagaagttcaaattgcaggaggctcacagtcgcaattaggagttttgcttgcaccaggtagaaccagaggtccgccaatacagtatcatattggattgcacctgacacgaagcactaataaaaactgcaatttcttagcaaacaataataaaaattcccgcaatttatattgcaatttatattgcaatttatatggtgcgcctagcaagtcacccctgccactggtgccggtaggaaccccaattggaatcaccgctcggtaatcgaccggccagcttacaccaagctcagcacgttcaaactcactgatgagatcttgaggcaggtcaactgcgggctgccatgttagctccgcatagcccacccagccaacaaaataataagcggcacctgctggattcgtttttttcgcgtatatcgcgtctactgtgtagagattgggaccttcgccgaagtcggatgagttgtcttctaacgaagacgtatcactctcgtccacggctggacgtggacagcaccatggcgtcgacagcgcttcttgtcggagaacttcaagaggggctggaacagcttggtggcgtgcctgccggtcgcgtgcccgcttagctgccgcgagagcggcaatttgcttgagcctcttgcccttcttcggcatctttgtttttcccaagtgcatagctagctaagccaagaatctaaggtagacgtgtgttgaagtgcgtgctaattggctagctattgtaggagtatttcaagcagtatatttttacactcatcaaaggcatgttgaaggattgatctataattatttatttcgggccgaccatatctttttagagggggatacaggtcaagataggcatacgctcgatatgaaatgcatcttcttcatcaatatgcctctgtcgaggctgggaatacctgcgttgaaaagcggacatacttggttacataactacgatttgacttggattgaaaatactgtattcgtgtcgtggcataatttaaaaaaaattctataaatatgaggagtgtaaacttcaatgttagggatggtcttattgagttatgtagctagaacgctccccactatcaatgcctctgctagtttagctaccctgctgcttgctaactcgggctactgtggaaacgtcccacatgccgcggttgacctggagaaacgccagctgctcgaagttggccggaagcatagatcgacgctgcggtgtcaataccagcttgcactgagagaaaagccgctcgacagtgtttgacgtcggaggaaccattttcacgagcggcatgtcatgtgtggtacttggcgcttgtttcctcttctttcccttgccttggagcaacatcgtcgcgtagtcttcttcccgctccttgcgcttctttcctgtgggttgtgcctgctcgaaccgcttcaaactgctgtctccgcggacgatagagccgtgccagagatgaccttgacaacacccgattcgaatgcaggcgtatggacgatcttggcggtcgacttcagatgctctgacatgacagggtactccgcgatgagggagtcgaacatcaggcgtacctctcctatatcggtgtcctcgcgctgaagccgcttacagacgctctcgaacttcttgaggtgctcaaacagcgcgaccaacttccggtgcttcccgccggttgggaccatttcctccacggcgtcgaccttcttgatctctacgcgaatacgaatgtacctctccaccattgtaaacgtcgaggaccaacgcgtgacgttccgcttgatagggacgagttcggtgtacttcttcagctcggcacggttgttttcatgacgaagttccaccataaggttgttgacttcgtccagtaagtcgccatacggctccatgaacttgttcacagccaggttgaaacgatgactggcgcagccgacgagggggatacccatcttggttgcaatggacaggttagttgcgcagttgtcccccaccagaaaccccaccatgtcgctggtcttgtcgtacacatccaggatgttcttgaacagcttgatgtgggcgtctgccgtctgatcgccatcgtcaaggggagacataccaagtagcggtatgcgcagcttaccagctgtctcgtagacggcgtagagagcaacatagtgaatgccagcgtgggtccagccgtcaaacatcagggcgaagagcgttcccatctctttccccagcttctcgccgacttcaattgcgatcccctccatgcccttcttgacggccttggcggtcacaggtcggagcttgctgatggcccgagttagtgcttcttcgacttcgtggacgggcatgttgcgttcgatgatccaacggacccattggaagagatggctggcttccactgcgacgaagccgaacgcttgaagaggtcggtccgggctggcctggagcgatgcgtacgttgcctcgtagccagcgtgcttcgatgccaggtgtgccaccagattggagtaacctgacccagccaactgtttgcgcacgctgttacataagttgcagctgaagaggcattcgccacgcgaggtgcagaagaaggcggcgagttgcttgttggcgaccattgctatcctgtggaaatggagatatgaactgccagtggagccgtatttgcaggctgcggagttggttggagcacgtctccaagccagtcatttgccttgggcgaaatgtggtgtggttaacgccgtttttgatgtcatcggaggctggagatgacgccatcaacaggaagctttgtacaaaaactataggagtccagccaaggcacttttatggaatttattgtcaataattgggccaatttaatattgtacggggaccactgtagcccaataataaaaattaatattgaaaatactgataatttattgtattgcactattttttccgacctctgggttgaactgcgtttcaagcacacaagcaagctggtacagcgggcgaaacttaaacttgtgctgaaggtactgatccatcagagcgagagagataacttcgagcgccgagaagaccagcaggttcgtcacagcggccacattccacttatgagtaccagccgggaagtagacagcattggggagctgagcaagcaccgacttgtagatcatgaagatgaggggaacgacgcactcgacatactcgacgagggcaagatattcggagtgaaatagcaaccggagtccctgccgtacaaaagcgcttgatctaccggcggacatgccgagcttgggcgtcttggggtccgactttgtaaagtctggactcacaatccccgcttgggtagagacattaacaagtgttagtccaggacctgggactacaggagtgcctcgcaatagttgagacgttagccgttggcagcacgctagacgccgagttgatttcgacgttcttccgctcactggaaggctttctcgactgtatagcccagacgaatccagcctttttagctgctctctttgctctgcagtcgttggatgagggagacacgcccacagtcgagtgccttccatatctgaagcgcgaaaactaccaggattgcgagccacaacaagaagttttgtcaggagctcatcgattcctgagcagtcggattgatcgggaatgccctgtcctagatcacggttaaagtccctctgctctcgaagtaattctaccacgatgtccgcatttctgcggagatcacggagttcaagcagagactgcacaaaatctatcacaattaccaccagggacatgcgaatcgatcccgaagttgagatgcatacggacacgaaaagcatgctgaagaggtcaaccgaaaaggtgaccattgcagggattaaatcctccagctgacgtgtggactgaacgataaagttctcagcggcgagtctccatactggcagaacaacgaccacaaccctcgatatgtcaagtggcgcaagatcgcacagcaccttgtacaatggatagagctcgatgagcacgatgtacgcgaagaagaaccgaaggaaccgacatagactcgggtagcagcgagagcttcggtctagttgcttacgaccaaacacgagcagaaccatcaaggggatatagacgcccagtaagctgcctccaaactgccatacaaagggcaccgggaatccgacgaagctagctacgagtaagcatgtccccatgtacgctgcagtagtgccgaaagctattatcaccctcttgcaccatgtgaagtggagctctgggatgaatatcttcagctcggacaccccagcaaaggtcaataaaaacaccatcaaacccaagcgaatccagaagacccagttcgcggcccaccgctcggatggtggctggagcggcagatactggagcagaattgcacaagccaacgttggcagcggcgttagcacgcacacagcaattacgcgggtcaacgacgagttcttgcagtagtagtccatgctttcagcgcgctcgatagaattggagccctgccgacccacttggacttcagaccatagtttatccaagccataacagcagcgtgtcactctggaaattcgcgggacccgcgaagaggtgacactcactggttcttggtccgcgctggtgggggtcgttcgaggcatccagcctaaaatggaaagtggtgataccctgagaaggacgcaggagaaccagatcgtgatggctattttttccccgttgcgaacgcgccctcttcgatcttaggtctcgaaactcagctcaagaaagtcaccaccttaccaccgatttcacttgcggcgacaacagaatccagagcttgagcagttctacgtatgcgttgttgcacttcactacttgggttttgagacagtcaagaacagttcgcatgaccccgatgtgcacgctctcagcgtaaaaaataaaagcaagccacgaaaatagctgttatctcgtagctcagcacccaccttatccaaagtgctcgtcagaatttcaacaccgacattcaatgaattgtctaagcttagacgtttgggcgtcaccgttcggctgcatccacgcgcgccacgatttcttgcagagtcattccgtccgtatactcgtccagcaaaatcctcctctccccgtcacaggcaaactcaaagatcttgcttaacataacagcatcagtcctctgcattgcactgtcctcgagtgcaggagagtccatggcgctgatgaatgccagcttcttcctggcttctttgcctcctcgcagccaatcgccgcgatgggccaaaaagcgcggcatatactcatcgaacaggttgaacgcaagcttaatgtgcaaacagctcagcgtacgattcgatttcagcagcccaagcaaaatctccaagtccgttcgttgtagtcgaccagtttgcaagtatagctcccgtagacgggatgcactagccagacttggacttgaaagcatttttgccaagcattccaagcttgatgtcgtaacgtttcgggacgagatgtgtaaggaggaaaccttacaggttcctgcaaccgaggcttccatcagtgtagaaaagtcatcgagtttccccgatcgtaaacttaattgggttaagtgtggacaacactccagcaattcgttgaagtgcgcgttggtgaatgcctcgcagttcagcgtcaatcgctcgagatggcctccaattactcgcagcagcgctaaggtcgccgatatatccactgtctttagcttgagggaagtgatgccagactcgcccgatggtagaacactcgaacgtgtggagatggatacaacagactggcgcttcacgaatccgcgtccgaaaccgggtagccatacgcaaacccaatcttcttctagggagagtacgacaaattcctcgtccttcttcagcgtcacaagaggttttgtgaataatcgacgtatcggctctggttcaactctggtataacttttcaccaaagccattgtcactccgcgtgttggtagtgacgaattctgcaaaccggggcttcccatcagcaattcgaacgcaacagaggaccatcgtcgcttcttgatgccacaaaccaatttgacgtcttcagccgacacatcaagctgcgatagatcgagatgctgcagcttggaccccgactctggatggaagatcgatagtgcgagccatatccacagcaaagtcctcctatcgcttcgaacagccggcggtagcacaacgcgaaggtcctgcaacgatccaataaacggaaaagctgagcacagcgtaccgaaaaacgccgcgtccgtcaggcatctccccgtgatctgtagcatacgtagcgcgtgctcattcgcgctcgaagcattccacaggagtgctttaaattcccgaagccgcttgtccaagttcctctcggcagaatcccagccaaagtgcagcatgagttccgtcaccgggacatcgccgccttgcacctgaaacaccgccgccgcatccctcagcacacccgacctccccaggcaatgctgcgccgatagaaagcactctgtaaagtgaaagggtatccacatcttggtcacctccgcctgctttgctgcattagtcaaccgaccccatctgttggcgtgctcctgcgtcgtctcgaccgcacactccacctgcaacaacgaccacctgtcctgctcaatgtgtcgcgccaagatctccatcgtaaggcgaaagcccgcgctctcgctctccttcgagtccgcaatgatgccttccaccagcgccaagacgtccgcgtggttcctgcctccgacctccccgtcccagaccctgaagaggaacttcagtctgtcggttgaaggcaccgggagccctctcagacgcaggtgcttccactgggcggcccacggcggctggtgccgctcatactccgggtcctcgggccacagctcgctccagaactttgcgttttccgtcattgagagccctttgcacgctgatagcgccgtgagcacccgcaaactttcacggatgttgcggcgcagcgtgtctcctgcgtggcctgccagttggtgcgacgagagcgtcaccacgacccacgagtacgcaggcgcgatggcgtccggatccagacgaagcgtcacgtccagcgagctgacggcagcgccagcgatgcggcgcgccgtctccagcggcagcggaggcactggatgcatcgtattgttatctctatatatgctgagactgcgctgcgcgggcggaagattgcggtgtgagattccttctctccctcgggatgaatatggaatgccccggtcaagggtcaacatcacgtcagcttcaacttgagctgtcattcgggtgcagtttgcgtgtccacacccaagtatcgtgtgcaccacatttctgccacgtggaaccgacaacctctagcaacgtataccaagtcccacaggccctgtccaagccgatcgatcccttcaaaccatgtgcttgctttgccagtcatagtcgatcgagtccccccttagactaacgtaccccacacctacgagtcaccatgagcgccgaagaggtccctgctgccgcggccgccgccgccgttgagctggagatcccggacgtgatcgagcgcctgcgcaagcccgacaaggccgagcacgaggccaagatcgcggtgctggacgccgccatcaagaagctgcaggcgcgcacgaccgtgatccgcgccgagatggacgcgctcaagacgaaccgcggcggctacggcggccagatccaggaggccaaggccacgttcgcggccctgcgcgccgagaaggacaacctcatccagcagcgcaaccagatcacggcgcgcctgcgccagacccgcgacgagaaggactcgaccatcaagcaccagcgcagcctgcgcgccaacctcaagttcggctccgaggccgagttcgacgccgccatcgccgagctcaagcacaagcaggagacgagctccatgtcgctcaacgaggagaagcgcgtgatcaaggagatcgagcagctacaggcgcagaagctgcaggtcggcgccttctcgggcgaccagggcgtcgtggacaagcagaacgagagcatcaaggagacgcgcgcgctgcaggccaagaagaacgaggagatcgacgccgtccaggagaagctcaacgcgcagaagcaggtgctcgacgagctctaccgcctcaacgaggaggagaacaagaaggacaagttcccggcgctcgccaaggagcgcaaggagatcaaggagcagctggacgacaagttcacggccattaaggcgctgcgcaaggagttcaaggaggccaacgacaagtactacaacaacatccgcctcgtgcgcaagaagaaggagctcgagttccagaaggaggaggaggcccgcaaggccgagtacgaggccaagctcgccgactacgagaaggagatggccaagatccacccgtaccaggacgagatggacctgtgcgacgccctcgtgagcttcctcgagaagacgtacgccaaggaactcaaggaggaggttgagaaggccgaggccgccgccgcccccgtcgagctcgacggcatgaagcccctgcagcgcaaggaggaggacttcatgatgctcggcggtggcaagaagaacaagaagggcaagtcgggcaaaaaggccaagaaggccggcaagatcgtcctgccgctcgcccagctcgaggccttcagcaccatcggcctgctgcccccggcggccgccgacgctgtgtccgagtcgctggccgccgtcaaggctaagaaggtctggttcaacgagcagacggcccgccccaaggccgagaagcccgctgagaccgctgccgaggctgctgcccccgccaaggccgcgtcccccaagaagaagagcaacaagaacaagaagttcaacgccggagacaacgacgccttcccgtcgctgggcggcgtcgctgctgagctcccctcgtggggcccgggcatggctccccccgttgccgccgagcccactgtggcggctgagttcgctgacgccgacgtcgtgacggaagacgagtaagccagcctccttcctcgtaggagagagtctagctcaagagtgaatgatcactcactcactcagtcacctctggacacggaaccaagcacgcttaaggggcgagaggcgctcgcttgttgccaaggaagagctcgcgtgctctcgcgccttcttttactctagtgcgtgtctgcttccatcccccggtagtaatacagtagatacttcccacgtttatccagttccaagcattgtgctcattccgctagctactcgatcgatcaacctcggcgaagagctgctgcatccgctcgttcttgagcttctcgctggccaacatgatctgcagcagttggtcggccaagcggtccttgaagagctgggcctcctccaactcgactcgagctagttgcgcgtcacgctgaagtcttcgagttcgctgcagcagagggcgaataattctctcgttgtacgcgagtgacttctgcaagagtcgaagttctgctgccagctgagggacgaggacttcgaggtgcaccaagttgcgctctgcttcctccgcttcttcatcgtctgtgtcgttgtcgccaccacgaagttcatctcctgcgtccatgtagcttgaaaggataggaagtcgctcaaagcagctggccatgcgctcgttgatgaactcgaacgggttgatccacgttgtgaagcctgaagccgatgagcgcgtcgtcgacgcggtggttgcctcgctgatagcgacctccatgagcttgcggaacttggagcgtagacgatttcggatctcgatacgctcgttcaactcgatggccgcctccgatagctcgtacgcgatggcatagcgcactgacatcgcttgagcctgggtcttctcggccgcctcaatcttgtgctgcaggaaggctgtatcactcgcaacatctgtgtcgaaccgacgtagtttagagcggatcaactccagagacttccgctgtgcagcggcatcgccttcgtgctcgagggtggggaacagcatgcgatgctcttcagatagtggtgtttgctgtagccgaagccgaagatactgtcaaatagcacacagatgatacacacgcaaacatttaagcttcttccttacgaggcacgaataatttgaaatcttacctcaagatgccgttcttcctccaactgctttagactggagcgagtcactttgtacagcaaggcacgctgtagcaacagctcgggggtaaacgcctcttccaggccgagtttggggttctttcggaagaattcgctgcactgctccatgtcctgcgatgttgatagtcaaggaatagagcgctattagagaaagtaagtgtgagatgcgccccacattctatcctaccatatcaagaagctttggtcgcagctccgaggtaatggcgagagcaacttggtaaacagtcttccatccgtccataaagaacaggtcccatacacgagtaagggtcgggatggtaagcactcgcgcaaatactgtcacaaaccactgaagcagcgccagtcgttagttattgcaaagtcacagtcacaagcagctaaggcaccagagatttgttacctgggtgataaggatgttggagtgcatcccaatctgccgaaaatgcgctgataaatcgtaaaagtggagcttgaggagctgctggaaaagataaatgcactgcgacagcctggatcataaagcagattatcggtagtacgttagtcaggcgttcgcgagtacactcgtacgaccgcatcagtaaacgaaccctggcatcttgtgcttccacaggtctgccatcccttttcgccgaattaaggagattgtcagccaaaacgcaacctcttgaactgaaagtccatcgaggtccaggttcgtggcttcttgagcatctttgatgacgacaattagagcagccacaacatagttcatgccctgtaaaaaaaaaactcaagcatttagctccaccaccacaacacaaaactcgcaccaccatccatacctggcaatagccaatatcgtctgcatgaagagcaaccgccttcagtacattcccaagcagccgtctaccgtcacctgccaatccaacaaatgcataacaatgcttgcatcaatacgactggcttactcaacaataacggcactactcaccttcctcagagaagagagggtttgctggaaaagtgcgctcaatatctcgactgatttctcctgtacccacgccaccacacaccgcataatcaactcggccgctggacgttcataaccccgaatcattaatcctctggttaccttccacgccggtgcttcctagtgtcgccgtgtcctccagtgtctcaatcccagccaactatccaacatcaaccacatctctcaatccaccaagctccagcacactgaagtttgtctcccagtacctccagatagagctctttgctgctcaattggttggccgcctcccccatcagcgtcgcgacgtcgccagctcgcagccagtagcttcaacattccgcaccattgatacatttcagctccaactctccccactccacactgcgacctctacagccttcacacttgtaactcactgaaacctcgtcgccctggggaaacctccgactcgaaccgccagtcgccgcagcctcagacgctccacagccgcccgcagcgtcttgttgactgcagcgacggcttccactgcgtccacctgcgcacccgtacgttaatacgcatacaatagggtatgggagtgaagaggagatcaaggcgcattacgtcgacccatccgtgctgcgcgagaacgcgtagagcctccaccagcggcgtcgccagctccccgtccgccgaggagctcatggctcgtgcatcaaaagtcagattgtcggaaatgattagttcaggtgtgccacaccaactattcctcctgacctacctccggcacagagagacttgagcggtcacgatgaaggcgaatgcaggcgtcgtcattgtacgcagttccagccgcaacaattaattgcattgcatattgacaccattaagcgcacttactgtgcgcattgctgtattttaattattatgcagacaggagagcgcgtgacgctcgtgccgtacgagacggagcatgtgcccaagtaccacaactggatgaaggacccgtggctgcaaggcgaggaaccaatagctgcaaccacctcggtggttttattataacaacggtagtatactgactggactgttttgtatggcgcagagatgacggcgtcggagccgctctcgatcgaggaggagtttgagatgcagagggcctggagggacgacgccgagagtacgaacgagatgcagttgaatctgactggatagagacgctgatactctttttctgtgtaatttatggggctgcagagtgcacgttcatcgtgttggcgcacgcggagggcgatggccagccgggggcttcgtacgtcgatgatagcgcgattgaccgtcagtttgttgcgaaggtggagatgaattggtgcaaataggctaaagtattgccgtgtggatggcttgatgcaggcatggcgggagacgtcaacctgttcttcaacgactacgacgacccccacgcgtgcgagatggagatcatgatcgccgaggacaagtaccgtcgcaagggcttcgcggaggaggcggtgaagctcatgatggcttacggtatggttgaaaagtgctggtctccagttgtgaggctctttaactgactggtggggaattttgctgctgtagccacctcccaactcaaggtcacgcggttcttctgcaagatcatcgaaacgaacagcgcgtcgctgaagcttttcgagaagtaagttatatttcctggttgcgctgtactcgacacctcagctgacattcgttgcttacaattgtttatggcacactataggcttgggtacatcaagtacgcctacgttgctgcgttcaagcaggtcgagctggagttggtcaccaaggataaacacgcggagctggttgacgccgtactaaagactgcgagcatccactccccccaatagagtcgagcagcaaacgtgacgatacacaaacgaatacagacgtggcaccatcaacagcgagaaagctttacaatattatgaagtgtttgtcatcgagatggagttcttttttcgtggccgaccaatatacgcagtaacggtcctcggcattgaagcggcgtgtccacttggtcgatgtctcgccgatgaagccgcagcccccgtcctcggcccatagctccaggcgtcccagcaggctggatcaacgaacaatctacttaccagcagaggtacgtcgagctggcgaaggcgactacatgtagaatccagtccagtccactgactgatcgctgcggcagataccttccgccttccagactggatctcgtcgatttgaggctgctcggcctgccacaagcgagacccagcgattccagaacgctcgggatcgttttgttgctgagccgtcaagttactttccaaaaattcgagagagcgctattgcccgggacaagcgcgaaaaggagctggtattgaagcagacacaccaaggatggaaccagtcgacgcggacgtctcgacggactcccaactcgcatccccaatattcgacgacggtccatgcaccgacaaagtcgctagcaatgctaggttcgttctgttatatttgtctttctgcggtgtcagacagataacacgtcaattggtgcaggccaggacgggatggctgcaatgcgcttggcgtttgaaagacgcggtcggctggatgaaaaggattttactgcggagatgcttcacgcattgcatgcacaagatttagaatgggaccagcaggtttgtggggtattgcgccctagattttacaagatgcaggacgctgatctatacttctttcaaggttaacctgatccacgagctcagtagcctttaccagcaagccgatttgcatgcggcgggatacctgacgtgggaggacttcagctcgtcaatcttcaagccctccggttcgtacattgtgctaatacctactgatatctttgaattcatgacgctggtatgcatgttacgggtagacaagcacttgccagaggaggaaacagccagtcagcgagtgcgtaaagcctcactcgtttgttttattttattttcgctgctaacagactgaaaactattttcttttcagttgatgtgccaacccgacgcgcttaacatgtcagctgaactccacggcatggtgggtcttgcatagatgttatgggttggtgtcggtggatcttatgttcgctgttgtggacttttatagtattatttcgagggtatcgatagagtatttctgaatgatgcgaggaataaaggctttcggctgctcgatcccacaacaaataccatcgtgagtgagtataacgctccctcaaggtaagatgaagagcccacaaagataatttcgatccatgcgcacaatcactatttatcttttttattaaccatgaagtgatcttacagaggcaccagcattttggacgctgtatactcgcctatgggtcgctacgtgatcacagctgcaacgtcaccagtcatcacgctttacgatgtagaccaacttctcattcggcaggtttgtctccaggctcggtccaaaagcaatttgttgcatcctaacctttcatgatgaacccttgctttcagcaaattcctactgaggtggcccaaacagctttagaaatttccctggacacgtcagctccgcggctctattcttcgtgtacgaatggacaaattcacgtgtggaatctggagacgctttcaaacttgcactcatttttcacgaagggccacgaggtcatgaccgacatcgctgccattcacagcacgacgcacattgctgcaagttgtctcgatggcaaaatctacgtgctcgatttgcacctcgagcgcattggcaaagccttgagtggccacgacaaaggcgtgacgatgctgaaatactgcgcgactaaaggctacctagtgagcggggggctggatcactgtcttcatctgtggaatcctcacgtggagcaaaagatcgggtctctaaagggccacaagcaccagttgatcggtctggagatcgccccagactcacctcaagtgatttcagccgacgaaagcggcttcatcaagatatgggacctacggaagtttgcacctgttcgagctttcaagcgcgaatcatacatacaggaccatactttaccacgaacgcttacgcgcccaatgcgatccatgtgctacatgccttcacggaagcggcttgcaatcgcccactccagcgtattttttgtggattttggtgtagatctcggagaaacaacaaaagtgaaggaagccagtcaacaattgtcggtacatcgtggtaaatttcgggatgatttcgatgtggaggagcggtccaagcctcttgcagtggtttcccaccatccaagcgattctattgtagtaataacaccgcgagagcttcaagcttgggctgccagttcgggagatttgcttcgacgagacaaactttccattcgagtcgatgttacctgcgtctccattgtggaagacaagtactcgtgtgttgtggggacagaagatgggaccgtagcgcgtgtgatgctccctcgcggtgccgtgattttatcaaagcgtctgcacactgccgaagttgcggcggtaagatgggtgcgcggctcaagacttgtcgtctcgagctcttttgacggcacagtgttgatttcgcagtccgcggatctagaggtgcgtcacacgctgaatcactggcacggcgtccaaagtgtaagcaacaacagcagtttggatgagaatagtaccgagaacggtgatacattgtcgatcgagaagttcacaagactgtttgagtctgctgactacgcccaaaccggcaagattacaacgcgaaaagccaaagaactcttggacgcagcattcccaacgctccatagcagtcaactatcgaacgcagtaaagaaaactttcgctggtcgagaagcagtcacactgactgcgttcctcaagaaagcgcaaatgagactgaaagatattcaacaagcagccacgctgagtagtgggaatggaggccccgatgccgtcacaattgacgtgcatggtaaacttcagcacttggtgacggtctccccctttgacggcacattctgtgtgtggaaagtgaagggcgggacggtggttgcaacaggtactgcgagcaagcctgagcatgacagcgattgtatgctcgattgtcctcacgagacgagcaggctgaaggcgtctctggttgggcaagttgtgtatctcgacccacacccatactttgtgctggtggaggaagggcgttcgtgtcagctatcgatttggtccagcagagctattccaccagttttcccatacgcgcatcaacgcattttgtgtctgcagtatggcaatgaactcgacccacaagtcgatgatcagtgctctgacagacacgttcgacacaatcctcacgcagattgtctcgtctgtgctgcggcgtggctctctgacgatactaacagtatattatgtgttggagacgatcacggtaagtgcatgagcactagtcgatgatctcttcgagtacatactaacaagtgttcttgctgctacaaggtttcgtcactttatacgactttgggggcttgttcaaggagatcgacacagttcgaaagtctatgacaccaaggtggacagatttggatcgaagtgacgccttctcttcagcattgctactgattcgctgtaggtggttggttcaaaagggtgactcagtgagggccttgtgtgtggttcatggagttgagagttcaagctcgttgcttgctgttaccagtgagagcggggctatctccttttacacggtggacggtcgatgcgtgggtgatctcgtggataaatccattccgtggcaactcaatctcactaagaccgaagccaacgaggcgtctaacgctgctgcggccaagatgctgcacgagttgaatagccataggcgagcatctcagacacagcaccgacgccagtcgcagacaaagcaagagtggattcgaagtgcttcttctctaagcgctaccgcccaggagaaaattgccgaggagtacgcaaagcaacgtccgggtctctcgcggttcctagctgtggcgaagcaactgtgagcgtggaacacctgaacactttgtacgatatattcactttttcattacgaactctcagtcctgagatcagcaggttcttcacagcaagcactcgaaccacttgagcggcttcttggcgctgctgaacagaccttcgccgttgtggaacgtcgtgtcggcatggttcaacgcagccgcgtaccaagtggctgagtacgtgtcgtcaaaggacgaggaatcgaggttaccgatgcagctctggaactccacgatgccgtcgttcttggacgaatggtgcgggatcagcagccctccagccagcaagcccgcgtactcactggacagcagtcccgagtacgtcgtgccgcacatactcgcagtcacgtacttctcgtgcacagctcgcgcggccgcatagcgagcagagcacgcggcatcgcagtagttgccgccatcatacaccagcgacctgcgcgtggtagtgcctggacactgaccgatgagtcctccgagctcagccaaaatgtcctgaagcacgctccctccgtcgcagatctggtgcaggaaatccgagcccatgctgcccttcatgggtccgctcaggtcgacccagtccacgttactgccgatcgagcacttgccagtcgccaacgctccagccagcatgttgttgcccatggagtgcgccacaatgatcaagtcgttgatctccgtcgagccgctgtcggttgtcccagtgctgacgttcatggcggcgttgcaagccttctcctgcagcgtgtcgttgtaccattcgtagtcgacggtattgaggatggcgaagctgaaggacgagcagcatggtgcgtgctccttgatgtccccgaagaaggaatagctgtccacaatgccgccgtccgcctcgacgtccatgccgtggaagaaaaggcacgggcggggggttcctaggcacgcgcacgtggcgctagcaaggcgagcagctccagcctgttccttaagcgtacgacgcgagcttgacgagctgagaccgtacagctgaaccacggaagacagcgccaccgaaccgtccgacactgcggtgcagtcgctcggagcgttcgccggcttggtgatcgtcacgtcttcagttaagtactcgaacgagatgctcaggtcttcgccgtacaccgtaaagttgccgtcctcggtgtctgaacccgtgcacagcacgtaggactcgccagcgaaggtcgtgctgagccacgcgccgttggcgcacgagatgtcctggttcgtgtcgacgctggagacggcggtggccgaggcgatggcctccacaatgaccgggacgctcgggaacagctgcgtgggcagacacgtcgtggagtcggccgtgctgttgatcacttcatggtacgggatgccgtcgaccaggacgaggttgtgcgtggtgccgtcctgctggaacgtgaccttgccgtcgaacgagatgttgctgccgctgagcacgggcttgacgtacacgtcgaagctggaggtgccgtagacctccatggtggagcgctggatgttgaagccgagcttgatggacgggagcgaggacgcagcagagaccacggcatcggaggcggccagggccagcacagccgcagcgagagagagggccgacttcattcggatttggagggtcacgagtcctgcgccacaccgagcaacttgaggaatgggagtaaggtcatgcgaggccgcgtgcagcttgtgaaggccatcctggcgagctgatacagtgcacgcgcgcttgataacgcaggaaagcagacgtaggccattgcgcccctccaacgcgatcacttcaacatgcaaaagatcgggaggtatgtgttttgaagactaagttgatcatacgtatgtatatcgacgtgaagtcgtcgtgactggtgcaaaagttatagcaggttcagctgacagttgaggtgtgtgtccttttaatgcagccgcgaagcgtgacaacgtttggatacaccgcgcggcgtctgctgcttcggctgcgctgttactcacggatcccgctcggatggccacgatgctggacgccgcagacagcggaacatcttcgtgacatcaacctccccaattggcagtcgatgctggttcccgctactgatctggggtctgttgccttgccgcttggtttacgactttggcttgactgcaacggcttcaaatgtttatcactcggaccagacgctcgtggtcgaccaacatggagtgtctgcaattgatgcagagaagcagggagcgagcaagggctcgcgtccagccactacaggcttcagatatccatgcatttggcttttaatgaacctacagctctatcatacccatcgctcgcattttacagcaggcactcgaaccacttcaggggcttctgcgcactgctgaacagcccgtcgccatcgtggaaagtcgtgtctgcgtggttgagcttcgcagcgtaccaggtgctggcgtacgtggtgtcgaacttggacgcgtccaagtcgccaacgcagctctggaactcgacctgcacagcaataacaaaagcaataagcagttagaacacgtcgccatgcactctaatcgtccacacaagacttacgatgccatcgttcttggacgagtggtgcgggatcagcagccctcccgccagcagtcccgcgtactccttcgagatgagtccattgtacgtcgtgccgcagatgcctgcagtcacgtacttggcgtacatggcgcgcgcagcagcataccgaagcgagcaggcggcgtcgcagtatttaccgccgtcgtacaccagcgagcggcgcgttgtcgttccggggcactgaccgatgagtcctccaaacttcgcgagcagagtatccgagtcgctgctgctgctgccacagatctggtagatgaagtcggagcccatgctgcccttcatgggcccgctcaacgccacccagtcgacgttcttgccgatcgagcatttgccagtcgccaacgctcccgcgaacatgctgttgcccatcgagtgagccaccacgatgaggtcgttgatcaccgtctccccgctgtccgttctgcccgtggtcacattcatggcggcgttgcaagccttctgctgcagcgtatcgttgtaccatgcgtagtccaccgtgttgaggatcgcaaagtggaaggacgagcagcatggcgcgtgctccttgatgtccccgaagaacgagtattcatccacgatccccccgtccgcagcgacgtccatgccgtggaagaaaaggcacgggcgcgtcgtgccctgacacgtgcacttggagctcgcgaggtgcgcggccccggcctcttccttgagcgcacggcgcgatcctgacgtcgtgagaccgtagatctggcccagtgaagacagcgcgacggaatctccggtcaccgcctcgcagtcggaaggagcgttggttggcttcgcaattgacacgtcctccgtaaagtactcaaacgaaacgcttaggtcctctccatacaccataaagttgccactgtcagcctcggcacccgtgcacagcacatacggctcgccggcgaagctggtgctgagccacgtcccgttggtgcaggagatgtcttggtccgtgttgacactggagactgcggtggcggatgcgagggcctccacgatgtcaggaacgctcgggacgttatccgttgggaggcacgtggtcgagttggaggtgctggagaccacctcgtagtacggcacattgtcgatgagcacaaagttgtacgtggtgccatcctgctcgaaggaggccttgccgtcgaaggtgacgctgcttccgcgctgaacgggcttgacgaagacgtcgaaggtggaggtgccgaagacttgcatagtggagcggtgtaccttgaagccgagcttgagcgacgggaggaatgaggctccgaagacggcgttgccgcctgtcagagccaatagcgccattgctgtcgcagcagcgagccgtgacgccaccatcttgatccaccgactcagggcaagagttccgattgagaaatgaggaggcacggggtcttcatcggagtgtgcagtgacataagcagccaattcaacaaaaagactgcttctgatcctgcaacatgaccccgaacagcgcaagtgggcgtcatagctatactgtaagaaaaggggccacagttgcagcagcaagtcaccgtgacatgggcatggtaagcttgcagtagcttacagtaagtagagtatgtacaaacacaacaccttaatgtaacttatcatacagtttactattcaagtgctcgatgtgagccaactccgtcgcgtaaagagtttgatggtactatgcaggagacagcttgacagtctccttccaacgttcttcttctggtggtgggcccgatggcgatgaagctcaaaactcaagtggctggtctgtagcataaaacgcgtgtatggatacatgaagatcgaagctggtgctcggtgccctgttactcacggaatcatcggatggccacgatggcagaacctgaagctctcgccgtcgccgacgacgacgagctgtagcaacttcccacacttcccattgttcgtcgtcggagtgttgcttatcattcttcaacatggtgtgcatgtactcaaagctcgggtagcaggctgcctcccttttacagtaggatacatgtatacattgcaacgctcattgcttcaggcaacagtgtggtcgtgttgccgcaacacgacctacagtagcttgcatgcacgcgtgcgtttctggtggtgcctggcatctcatgccgtctgcggatacagtatgagaccagaccgcgggttctcgtttacagccgatttcgcaaccgatgtttatcactcgcgcgtccatgcatgtactcatgaagcttcgacttcctttttagttggtcggtcctgtactgtatcgcgggacacgtgcatcatgcaatgcgctcgagtacatgtaccgcatgtacctccagctcagttctattctattgagtttcatcatctatcggcacttttacagtaagcattcaaaccacttcagaggtttctggcccttactaaagagcccttcgccgtcgtggaatgtcgtgtcagcatggttcaactttgcagcgtaccaagtgcttgaatacgtgggttcaaacaacgaggcgtccaagttgccaacgcagctcttaaactccacctaccaacagcataaaacacaacaaacttgtaagtaaaaaagcccagaacgccagcaaaatatgccgaaatacttaccactccgtcgttcttagacgaacggtgagggatgatcaagcctccggccaccaaacccgcgtactctttcgagaagagtccgttgtacgtcgtgccgcacatactcgcagtcacgtacttcttgtgtattttcagtgccgccgcgtaccgagccgacatcttcttatcgcaatactcccctccataatacacaagagaccgccgagtcgtgctgccggggcattggccgatcagtcctccaaacttggacaaaatgtctggagatccgtcctcgccgccgtcgcagatgtcgtggatgaaatccgagcccatactgcccttcataggcccactcagatcgacccagtccacattcctcccaatggagcacatgccactcgcgagcgcgctcgcgaacatgttgttgcccatggagtgtgcgacaacgataaggttattgatcactgtggattcgctgtccgtggacccggtactgacgttcaaagcggcgttgcaagccttctccaatagcgtctcgttgtaccactcgtagtcgaccgtgttgaggatcgcgaagctgaaggacgaacagcacggcgcgtgctgcttgatcttcccaaagaacgggtagtcatcgatgatcccgccgtccttctcgacgtccataccgtggaagaaaaggcacggacgaggtttgctttggcacgagcacttggcactcgagagggacgctgtcttaacctcctccttgagtctgcgctgtgagccggagagagccttaccataaatcttttccagagccgataatgccaccgatccgtccttcacagcggcacagtcgcttggagagttcaacggcttgttcacttccacattctcggtcaaatactcgagcgagacgctcaagtccgcgccgtacactgtaaagttgacatcgtcgggcttggagcacaccacgtaagactcgccgtccaatgtcgtgctcagccacgttccgtcggtgcaggagatcgcttggttcgtcgagacactggcgaccgcagtagctgaagcgatggcgttaaccacgtcggacacgcctggaatgaactctgtggactggcaggtggtgatgctggctgaaccgtcgatgacttcgtggtacggcacgctgtcgacgaggaggaagttgtgcgtggcgccgtcctgcttgaccgacagcttcccgttgaattgaacactgtccccgctcacgacgggcgtgacaaagatgtcgaaggcggaggctccacgcaccgccatactggggcgatggacgtcgaacacgagcttgagcgacggcagcgcggcgtcgcagctcgcaagcaccaataacgtcatcgccatcgcgactaagcgtgaagagaccatggttcaggggagctgaaagccggtggtggcgaccgcgacgatcgccaaatggcggtcaaggagccgcttgagcttctcgccgtgtcgtcggcttatcctgcgatttggcccataggtaaacaagaatgaagtgatggaaatgcagagtatgagagcctgcgccaaattgtgcaacgtgtttgtcacgcggagtacagacaacgacggataaatacggcaacgcaaaacccggcacacatatgttgtactttttacaataagtaattcagatagccaatcaacttcgagatttacacttgacatttgtgttccatatggttttaagtactttctctaaatttgtgtgtactttatgctccgttacgtgtactttatgtcattgccttgtacaatctctatcgttcctgacagagaattctggcacatttactatggaggatgccattcagtggtgccggatttatccgtcgttgtctgtaccgcttggatacagttttgatgtctccacttactttaccaggtatgtgaactttgtcttacagaagacactcgaaccacttgactggcctcttcgtgtcgctgaacaagctgtctcggaagcggaaggtcgtgtcgaggtggttgagctcagtcacgtagagcttgctgttcgacgaggcgttgaagaggtccttgggcaggcccttggcgcagctctggaactcgatgatgccgtcgttctcacgcgagtggtgagggatcaaggagcctccaacgttgaagatgggcgtcacgactgacaccagccccgagtagttgttgctacacataaccgcatcgacgttatcggcgtacgcgcgttgcgaagcttcataatcagcgttcaacctcgtcgagctgcggttgctgcctcgccacgcgagcgcgcctcgagcagcgcaaacagggcatccaccgagaagatcgagcagcttctgcacgatcccagacaaatcgccattgcacgcgtcgtacagataatttgtgcccatactgccctccatggtatacccatccaagtcgacgaagcgtccaagctgcacattcccttggcaatggcacctccaagcgccaaattcgccagtgaatgcgtgaccacgattgtgtccttgatgtctcctgaggttgcgttgctggagttgctaacctggagcaccaagtctgctagtcgctgttggaatgttgcattgttccaagcgtccacatgagtcgacatcacgatgtactggatgatcgtgcaacatgacgcgtggtccgggaacttgctcccgaagtacgaccgcgggtcatgggtagtcagtccgtagtctttccatgttgcgagcccagtgacgaagacacaaggccacctcttggcctttcaggagcaagtggcgtcgggagtgcccctcaacccgttgacaaagtccgagaaactgtactcagcttcctcagagcgtagggaacggtgaccccactcggtgaacgagcgcgtcactagcgacgggatcgacggagtgatacgctcggcgaatggcacctttccacaggtcgatgctgcgtcaactggcacgcgcggagcaactattgtcggtggaatctgttcatacttcacgtcaatgtcaaaatccgagccaaagatctggaaaccatcatgttcttggaaccacgaggagcttgaacacagcacgtagttctcgcctgcaaactggaacagcatcggggacccacgtggacacttgccgctagattggatcagatggtggattcgtgaatggcgtcgagcaccgtctcaataggaggcaccgacgtggacggaatgcatcctgattccatctgccctgcgtccttgttaatcggtcgctgggtgtagtaagccgtgccgttcacgatcgcgtactcgtgcgaatatccattttcctcttggaacgaggctaacccgttgtaaacgatgctcctgtcgtccagtgcgctccttggcgcgggcgtcgccaggacctgaaatgaggacgcgccgtggacgtgcatggccttccgcttgagctggaaagtgagtcgaagtgctggttgctcctgcagactccgcaggatgcggtgcttggccagatgtgcgtggaagtggtgggaatatgtggagaactggacgacgaagagcagagcgaccgtggtgacgagcaccgctaccgggacgagagtccatagtcgtcgcctggagggtggggaaacatgctgctgcttcacgcgcagtcctgccacggggtctgctgtctcagaccgagaggcccgcgagttgcgcgcggtgcggtgagtctccctctgcggaggttctctgagagaacttctctcgccatcctgcaccattgctgctcgatatacggtctcccacatcacgcagaaaatgcttggtgcacgtatccgtgtgctgctacatgtattattgtacctttcacctattttggcgggtgagctgttaaatcaggcggaattagatccataaatggacgaacaacgcttatttagtattaattccgcctatgattgtgagtgattcccctaacccacgccatcagcatttgcgagccaatcgacggagatacaagcagaatggcatggagcaaaccgccaatcgctctgtttctgtctaaatcaggctggattagcttattccgccttaactcggcctcatcatcgccgctcttaattcgaccgtgggacgacccggaattaacatgggaattagataactcatggcataattagagccgagaagggattagaattatgccagaattatcacggcagaataagtgaaaggcacaatacatgtaggcccaaaggattcctcccgctatcgctactgtactctccaaatcgtgatccccccgcgtactgccgtatgatgcgagttcaagctggactcgattgagtaagtacggtagccaaataccgctacatgtacacgcatgttcgaagagcattgctcttggtcttgcctctataaggtaacaacttccaggcctcatgcttgtttctcggatcaaactacgcaacctgatgctgctctaataaacgtcatccacgagcgcacgaagcagaccgtataattaacgccacgattctactcatagacgctcacgcatcgaagttacagaagacactcgaaccacttcactggccgcttgctatcactaaagaggctgtctccgttccggaaggaggtgtcgacgtggttgagcccagacacgtagaatgtgctgttcgatgtgccagcaaacttgtccatatcgaggcccttcgcacagctttgatactccacgacgccgtcgttcagcggagacttgtgcggaatcacagccgccgccagcgagtaaacagccgcctggatcgtattcagacccgtgtggtttttgctgcacaagacggcggagatgtttgaagcgtacgcggcttgggcggacgcgaagtccttatccagcttcgggttgctgtagtttgagccttggtatgcgagcgaggctcgaccgggtttaggagggcagttccccaataaatccaagactttctccaccacaacagtcagcgcgccgtcacaagtttcgtagagatagttcgaccccatgctgccctccagcggcccactcgtgcccacccacgtcgaagtcaagtccaaagctaccaggcccgacgctatagctcctcccaacatcaaattccccatagaatgggccactacaatagtgtccttgacagtcttcttagctacgtcgctcgtattgctcacgtcaagcagcaagtccactaggcgtccttggaacgttgcattgttccaggcgttcacctgcgtcgccaatgtgatgtatttgatgacggtgcgtggtctgctatactatctccaaagtaattcgctgggtcgtcgtcagtaagaccgtagtccttgtaagacttgagccccgcaacaaacacgcaggcgcgtcgtttgcccttgcacttgcacgtcgagtcatcgtctcccgttatcgcgttcaccacatctccaaagctgaactctgtctcttcagcacgaagggaacggtgtccccactccaacaacgaccgcttcaccatgttcgacacggacagagcgatgcgtctttcgaatgaaactgagccacaagctgctgccacacttgatgcatcacgacggggtacaatagttggagcagactgctcgtacttgacatcgatgtccaggtgagagccaaatatctgaaacccgtcgtcctggaaccagttggagctcgatagacgcgaacacagcacgtagtcttcgccagcgaacgggaaaacaagcatggatccgccagggcatttgctgtcggcatgtcctggggggagcaggtatgtggctgtcctagcgtcgtgaatggcgctgagtaccgtgtcaattggtggcacgacgtgagacggaagacaccccgactcggttgctgtggccttgcctcctggacgacgagtgtagtaggcaacgccgtccacgagcgagtattcgtgggtgtctccatcctcctcgaacgacgctattccgttgtacgctaccgcattctcgccccgccataccgtcggaactggcgtcgctagaacgtcaaaggttgacgcatcgtgaatgtgcatggccttgggcttgagttggaaggtgagtcgcaatgacggctgagtctgtagactacgcagaatccgatgcttggcgaggtgcgcgtgaaagtggtgggtgaaagtcgtgaactgtgtgatgaagaggaggacgccgacgaaagcgaccagtgccgctcgtagccagaaccatgatcgtcgatgcgggctcttgactttcacgtcttctctggtttgcagcggtaggttcgcgcttcatgatgcaaattcgagactgcgcgctcacatcttcgctttgatgaactggagtaatcgaatgagtgggtcgtccgctgacgttggatcttcgagttctgctgtcggtatcgatcctgtagagtagaactcacagaattcatggttgggtaaagcattattcggacttgatctagcttttcgtaagcgcaaaacacacaaaagcatccttgataaatgtccgcagtgcttgtgataaatcggtgctccggcaaagaacaatgcatcgacgaatttgccgtcatccacgtttggtacgttgctaccataacgctctatgctgctacagtccttggcactgtaacgagcttcttatcttgcccagctcgtggggcagatcgtattgctccgctgcgttcgttcgcccgcgggaactggaagttgactccgtgctggccgacagcagctaaccgagctactgcgccggatcgtccgtacacacacgaacgtatccaattttattaaggaggctagattactcaatagtcctcagccaactcgtagctgtcagcccacagccgacaactagagctaactacactcagtcaatacaaagagagttcacccacgcacgcgagctactaaccctccactcgttcgtcagtagcagcggagcgcccgtcgacactccaccaccacctgtccgtcactcgtccagaaggagctgtcacccccagcaagagctttcgccctcgtacttcgttcagcaagagctttcgccctcgttcgttgtccggcaacccgtcaccaggccacccaactcgtaagtgctcgcttgctccaagcgcgctaattctcaaccgcttgcgcctcaccgcgcaaatttccgactccccgtcctcactcgttcgccaccgctcgttcttctccagcccgaaggccagttcgcactgccgacccttcagcttcgagatcttcttcgtcagccactcccagccgtccgttccggctgccactgctctcggagcgaccgttcgctgccaagatcgcgttcgtgcggctctccgcacccaccgtcgtctggatctcgcgacccgccaccgcgcacccatgccagccgctctcatccgccatgcgaccagctaccgctgctcgccttcatggtcaccatgccgtgaccgccacctgcccatgtcctgttacagcactttgctttactatggggagccagcagcttggatcgggcatcaaaggcatccggtcttggagattgaatgtgggggagcgaggaacgagctgtgcagttgttcacctttttgccttctgtggctcatgccaaccgtttgagtcgcatcaacttgatgaggtccatcatggaagcagcacttcctcctaaacttaagcttcaacgcctattacaccagacgaaagaaggtagcgagatgtcgacgtatctcgtctaccagttcaccattaaaccatcaatacaatcaaaacctgtactacagcgacaggaagttctgctcattgccgcgcgagtatttattgaatccagccagccaccaacctacaggaggcattcgaaccacttcaccggtttcttcgagtcgccaaagacaccatcaccattacggaaggacgtgtccacgtggttgagctccgtcacgtagcgcgcgctctcgtacgtgttgtcaaagctctccattgggagccccatcgcgcagctcgagtactcgacaatgccatcgttcttagacgagtggtgcggcaacagctcgcccgcgagcgtgtacagcgccgccttgaccgtgaccaagcccgagaagttgtcactgcacataacagccgtcacgtttgacgcgtaggccgcctgggccgccgcgtacgcagagttcataggggcagacgacaagttggtgccttcgtaggcgagcgatatctggccagtgttgacggggcagttgccgagcaactcgacgatgctcgcgacgaagccgctttgctcgccgttgcacgattcctggatgtagttggagcccatactcccttccattggggtgctggcggccacccacgacgtcgacggatcgatcttggccttgccgcctgcgattgctccggacaggatcaagttggccatagagtggccgacgatgatcgtgtccttgatcgttccagtcgccgggtcgctggagctgctcacttgcatgatcaagtccaccaggcgctgctggaacacggggtcgtaccatgagttgtccttggtcgccagcgtgatgaactgtcggctcgagcagcacggcgagtggtccttgatctcgtctccgaagtagcccttggggtcgtcgttcgtcaaaccaaggtcatcgtacgagctgagacccgcgacgaagacgcacggacgctgggcgcccttgcagccgcacacgttgtcggtgatgaggttccaggccttcttgaagatgtcccactcggccttctcggcacgcagagcgcggtggccccattcggagacggagcgcgtcatcagcgacggcagtgacggagcgatacgctctccgaacgggaccttgttgcaggacgccagcacactcgacgccactcggggcgcgacgatcttcggcgccgtggcctcgtacttgacgttgatgttgaggtccgagccgtagatctgaaagccgtcgtccttgaaccacgacgagctcgaggggcgagaacacagcacgaaatcctcgccggcgaaagggaagactatcatagacccacccggacacttctccttgacgacctcaggctccagcatgtgggtggcggtggcggcaccctgaatggcgctcaacacactgccgatagggggaatggagtttgccggcagacatcccgactcaacctcggcatctgattgaccggtcggacgcctcgtgtagtacgccgtgccgtccacgatcgagtactcgtgcgtgtgtccgccctgctcaaacgaggccatgccatcgtacaccatgctcttgccgcttgaaggggccggagtcgccacaacgtcgaaagttgaggccccgtggacgtacatgggcttacgcttgagctcgaacgtcatgcgcagcgcaggctgctcctgtagactgcgcagaatgcggtgcttggccatgtgcgcgtggaagtggtgcgtgtagtgcgtgaactgggtcaccatcagcacggcgccgaccgtggcgatcagcgacagcctccaggacgcccatggttgacgcgtggggcgccgttcctcctcatgcttgagcgtcgccgcggcttcgaggcccatggcagcaacagtataagctgtcaaagcgaaagcgaattgaaaagtgtcgtgtcgctatcgtcgacacgacacttttcaattcgcttcatatcatagctaggcgtgaatgacctgaacgtctccgacagttgtggtacaaatgcagggagcctgcacttgggatttgcccacactcgcgttgactatggctcgagacatcggatcaaaggcgtctggtgtcgtggagagggattcggggagcggcttccgggctgtgctatcaagcttttcgcacatggaaggagctcagtgagctcacacagcgtgagtcaggcgcggccaacacttccggcccatgacatccccttgagatgatgagtgaacggaggttcacatgcagcgacgaggaatgcgcgcgtaaggagagagattcgcacgccttgcgaagagcgacatcgtggccacaacactgcttgccccttcaacgttggcagcaaaccatgagctcacgacgaaaggcataaccttcccaagccacagatccacctctactagagctcattactctcgacccagcccgaatgacggaaatacagtagagatccttcgcttaggaatgaatcacgacagtacggtatgttaatggttctgggggggggggggggtagtgtcgctatgagagcaagtgctgcagccacttcatgggcttcttgttcttgacgtcgctaaagaggctgtctccgtcgcgaaaggtgcagtcctggtggttgagctcggtcaagcagttggtgctggtgtacgaggacgagaacgtgcttgtgtcgagcccgtaagcgcagctctggtactctaccaggccgtcgttctcagaaaagccttgtgcgagatcacctctccggccatggcgtacacggcttggtaggccgctgtagctgctactgcacatgactgcgtccacattggtcgcgtacgcggtctgcgctgcctcatacgctgctttcaactcggacgaagcgtagctccccgattcataagagagtgcggttcttcctggcgtcacggggcactcgtccaagagctctaggagagacgacacgacgccagaaagagtaccgtcgcaggtttcctggatgaaattggagcccatactccccatcataggggcgctggcaccgggccaagttgtgctcgaggccagcgagcacaagttctgggagatcgcgtacgccagcatgttgttagccgacgagtgcgtaaagatgaccgtgtctgcgatgagaccagtgctcgagtcgcttgacgagctgacctctaacaaatagccgaccaattcgttcacaagggtgaggtcgtaccatgaacaacacggcacgtagtcttggaattcgtccccaaagtaaggcttcgagtccgtggttgacaacccgtagtccgtcttctgaccgagtccagccacgaacacgcacgggcgaggtgtcgtgctgcacgagctgctgctcgatcccgagtcgccggaaacagtggacatcacggacgacacgagcgatgacagccaacggagagtgcggtggccccactccgacaacgaccggtgaagcagcgacaccgcaggcggtgacacagtatcgcagaattgaactttgccacagtactccttcgcgtcggccggaatcgtaggttccacgataaccggggctgagtctttgtactgaacggtgatgtccaggtcctcgcccatgatcttgaagccgtgaccactgctctccagcgatatcgtctccgattcaggctggttttgccatcgagcttcccattttgacagttattgacaccaagttgaagtagagacatcttagggtgattagatagatactataagtatttaatttttccggcagtacccagtattatcagtattatccgtatcgctgcaacgttcggtcaattttcaactgagtgagctgaccaaaggtgctgccgagggtgacaccctcggggaccgacaacaaagtgtcgtggcaccgtcctagacgctgcctttgtgtcccctgtaacccgtcaatgggatttactgtgctttaacttttttttctgtcggagcgcaagagtttgtatcaaagtttcgttcaggttcactgttcgcaccaggcatgcttcatcctcttgatgtgcgggtaatgtgtctaactgacccaaatgtacgcaagcttgtatggcactaataattacagcggctgcactcgtagagaggtgtgactggggggtgatccacctctcgcgctgcagcgtggctctacgatcccaaccacctttacggggtgaaggctgcgtacatctggcctccgtttgcccaggacagcggttggtacccaacactcacatgcttatgatcactttctactgtgacggcagcatcactcccccccccccacttgcatgatcctcgtcgtacgaacatgaacataagctgcgttgtcgtaacgaattgccgccagcgaaaagtctgagctcgattggatattgacaagcacgagttgctgtctactgcagaattgactacagtcggcacgtggcctacggcggttggtaggaatctctaggagtagcgaaagctgatgtgaagatttgtgcgcgcagcttgtatcccaaacttagcatacctcatgaccccgtcgaatcctaccagttcagttctggagttcactctccaaatttcactttgctacgcctgtttcgtcagcgtgggctagtcttgcttcaacttttatgtgtggggacttcagccaaccgattgaggggctgtgaggcattcgttgtacatgtagctatagagacaccaatgtatcgagcacttatcgccttactctactaagagcggtgtactgtgcgttatgagtcgtaacacgccagtacacttcgaaaaggggtcccgcaaatgctacattcccgcgctcttgatcatgcagccaggactccaccggaacctcgcttgaatatgatgatactgttcttgttcatttctccttcgaaatcgtagcgttgggctgaatactcgagtgcaacccgaaacgggcagaatctgttgcgggagccaagatcatactgtccactggacaatttttcagctcgcagcgacaagtcctggcttgctcgctggcgcaacacctgatgagacgaactgcatcgcgagagcccagtggtcgagcgcggccggtgccatgcagccatgctaccttcaaggattctgctgcaccaagccccggaaaccatgcctaacttcagccaaacgcagcagaagacgtcgaacacgtacccagcgggctgcactgcacatgtatgcacagcatgacagcagcatgcaatgcaatgcagaccaggcgaggcgcacgcaacttgctctgtaagccacagacggctgagtggccgaccgagcgtcgtcaccgccctcgcttcgcgcgaagaggggaaaacaggtcaatcctaacagttggtcacgggtatgatggtcaaataggtcacacatcaggacgctaggtcacgtgaccaaacttaacaggtcacacccattgatgtagacggtaagatgcgcgcacgcccgcatgagaatgagagcaaaatgcatacttaagtatgcagcttcgaagcggacgaggacccacttctcgtcagcctgaagaattcagacatcatacaagtttctcagtacacacgacacctctctcaatgctttcgtactctgtcagtgcggtttcctacaggacacgaagtgctgcaccgtgagttgctgctgtgttacagtagaagctggctaagtgctgcactgtgggctgcctatcatcttgcacagcgtgcttgctactagcaaaagtaccatgttgcgctgcaagtccttaccatgctaaaatgtgtgcttcctaccatttacactgcaagagaccgcccaccatgcatgctgcacgggcagtagttacattgctaaacagtgagctgctaccacgcgtgtgtgatgctcgtagtatgagcgcagatcgcaataccctagatagaggaggtggtgctacctaccatgttgcagtacgagcaccgtacaaagtcaccaacccgtgctcacgggactccgctcgcattcagcgcttgagctcatggactcagcgtcacgtagcgttatctcgacctagccttgagtcttgctcgacgtgtcggaccccgtaacctcgctcgaggtcgaagtcgagtaccccgccgcccgctgttcctgggatcacagcgttgccgaaggccatgggcatgctgcacagatttgaccgcacactcgactcgccgtctcgtttcgtttcaaggtgcggcgcattacagtcatttagcctaactaacggcttagcaaatgcccgatcctccagcgcttacaattcactctgcctaccttgcaaggtgacagcatatgcacacttgctacggtgtgccagtgagagtgaaggtccggtggtccatccagcgtccagcttcggtttggagggacgcgagcactgttgtccaccgcgacggtaagcgggggagattctcgcgactcggccgtctcggaggcataacgactgtatttgtagcgaagagtcagagctgtatgtaggtttcggaacactattataaaggaccagggaggctagcgctccgagcaaaccaaagctctgtttagcttaagaggttgatttcaaagtaatctgtgtatgtgtttcagctgactcctgctagcgccttctgccagcgtcttctaccaaaccgacccccctctctctctgtcgttcgcatgttcctccctttcctaccgcccgctttgtagcgtcgctctgtagaagccacccgatgagtgggctgggctcgcttctgtggaaacctccactgcacttatcatgtatttgcctatcatatttcactgctagtagtaccatgctatattttgagccgcctaccatacctagctttcattctacacaataacgcaactcaactattgcaaagtacacagtgtaatagcgaggcaaccggctcgtatagtgcgacatggtagtacaagtagactgtagggctacacaccctcccatgaacaacttcgttgacatagggaacccattatgaaattccggattctatttcgtcctttgtagcattcacttagaaaaattatacgcgcctagaacagtagctaacccatcgcaccacagctcagcactcgagcttgacacttcaacatgagacggcccccatcgcgtaatgtaggccacgaaaaggtatttctcacgaatatgcggcaccgcgcgttgttatccattccaggctcggtacccggtaggcctcctcggcggaaacgtctccagctgccgagtgcgcctcaactgcgtcaggccgccgacattgtggggtcagagaagagcaaagacttatgagagcagcctaccatcgccactgatgaccctgaatcctgctctagtgctagaggccgacgatgccgagatggatcatgaaacagcagactatcgtccagacgactcttttgactacgacagcgcggaataatggtgcggaagtcgctatctgtcaggagcagaatcgctataacgcatttacttaacaaccaaaccgtttgcgaattacatgtgacctcattcgcttaggtcacgttaccaaagtaaggatttgacccgtgaccaaaatgtaggattgacctaaaaatccggttacccgcttcgcgcaaggcgagctgatcctcgaaacgccccccagccagacacgcggccaacgttccgctttcaccgcccacttaccagtcgaccggagtcgattgcttggcgccagcgcttgagagcctacacttttccgaatccaccctggttgaagttgccccgaacttcaagctggactcgatcgacaatcgccgtgtcgtccagccgctttggcctgcacgccacgccccccatcgaggacacctcgacaatgcccgcggagcctttcttccccagcggcatgaagcatcaatgccgccattaccacttgtcctcgtcaatggggccgccgccaagcagcgcgagcgaaccagcttggtcgttcaggccaagcacctcgactcggtcgaagcgggctgatcgagtgccaatacagtactggaacaaacgctacagatctgctggtggttgcgtcgacatcggagaccatgtcgacgaggaatcccgtgatacgttcgacagtcgaatcgactatcgggttcaactgactcgaacggggccggtggacactcgcgcatcagcgccaacggcagcttggaaaatggtcgctccaggtctccgttgcgggtccggcagcagctcaggacgccaagcccgctgtcaggccggtgccgctcggctggagattccaaactcgtagacacacaatagtcgagctgcgtctacgctggaccaaccttgcgctggaacccaccgcgcgtggacctcgatgcagccactttgggcggttgaagtcgcggcaccatctttaccgtgcagcaccctgctcgaccgacccgtacaggcaaaggctgactgactggttgcggccgccgccacctcaccgaaaacggaaatcagcgccggcgttttgccgacaggcgagcgccatcgcgccatcgaaaatcgacaggctgcgcgcgcgctcgacaacagcagcggtggcaatggcagcagcagcgtgaatggccggcactgtcggcgcgtgaggcggccgtgtcgaccgaccgcgggaacgctgcctcgtggtcttcgctatgggccctcgctctgggcggctcatctgcgcgggcacgccagccacgcagtccagcggcgcttccatatttttccttctccgcgcagctagccgaagggccgggccgggatccgccgaaaggccgctcggctcattccagcttcggcagcgtcgagaccgcaccgacactcccacgcgtccggacatgggcctggcggagcacatgagcgagaacgtgagcaacaacggccagcagcagcccgagactggctgctggcgccagtgggagcccgaccgcgagccccccatggacggcaagcccgaccccgtgagctgcgccggcggcaccgacgagccgcgccgactgccggcgctcgacgacctgcgcccgccctcctcgagcgcgccgcccaacccgctggcgccgctcaaccaccacaaccaggtgacgcgcttcatggccaagcaggcgctcggctacatccccaagctcagcgtgcgcagccccgagcgcagcacgtcgcccgtctacggcggcggcgtcttcagcttcgagagcccgcgcgccagcggcgtcggctcgccgtccttccggctgccgagcctctcgggcacgccgccgctgtcgccgcagaagtgggcggggccgtccccgttctccggccaagacgacgcgcaggccggcaatgacggcagcggccggccgagcctgccggcattcggccagggcgccggcaacttcatccagcgctcgggcagcttctccgagagctgcgcgtccccgatcccgccgctcaagcgccagcaccaggagacgccggccacgacgacgacgacgcaccaccccatgtccatcgccgatctttgccagccgttccgctacatgcgcgcggcctcgtgcccgtccgacacgaacccggcagctgccggcggatcggcgccgaccacgccgcccgagagcctgccccagcccagcgtcgagcagagctggagacccgccatcgagccgcagacctacatgcgcacgcagtcgggatgcagcgacgtcgacacgctgcgcggcagcctgccgttgagcggcccaccgtcaatggacgacgacttccgccggaaccgcctcgagcgcagcagctccatggacgcgcagacgctcatgcgcggcctcaagcgccccgcggccatgccggtcgacctcacgcagtggctcgaccggccgtgccggagctccctgagctcgctggccgactcggcggccgactcggcggccgactcgatgcacctgctcgagcaggccgggcgctccatgcgcatctcggactcgccccgggcggaccccatcgacgcgtcgcgcgaggccaagcgcgagaagaagctctgtgccttcccgcagtgcaccagcaacgccgtgacgcgcggcctatgcatcagccacggcggcggccgccggtgccaacgtaagggctgcacgcgcggcgcccagagcaaggggctgtgtgtggcccacggcggcggccgcatctgccgcgctgctgggtgctccaacatccaacgcagcatggggctgtgcatccgccacggcggcggccggcgctgcagcgtcaagggctgccagaagggcgtcgtgcggcaggacctgtgcaccgcccacggcggcaagcgcaagtgccgcgtgcccgactgcaccaagcacgtcaagaagaaaggtttgtgccggtcgcacgccaactctatgtacgctatgcctttgcccggctcgagttaagtaagctaggaagtccaggaggccatcgagctgcgagaacgcagcgcctcgagccacgagcccaccaagttcattgtccacattaaacataagtgtacatataggcgaatgccatagtgtcgatacgcatcggcctcaaagtgctcatacttcttcgatagcgatcttctctcggttggagcgccgtgcacggcagcatggcatccgtcgctacatattatgataagcagtctcggtgatcgagcctagcaaatcccatgcggctcgcgcggtgcccgacatgagtcacatgatgtcggacgtgtcaaatgcatcggcatctgttgctttcggtgcatcgatcgccgcactgaaagacaagagaccgaaagcgctggctgaagttttgatcgcgaagacaatcaaatcgcctcgaggcaatgcggcggctgggcgagggcactaccaggcaagtgcaaatggcatccggtcaacgcggattccgcgttgaccaacggttgaccgacaccttcgagctgccgatcgattcaagcgctccgcgtcgatgccgccgcaaagaacctactgtacaacaccgtgagtcaacagacgagtctagcaggaacctgccatgaatttgatggcgggcaaatgaaatgctagctggcgggactgcgggccatcgctgcttgccaccagcagcttgtacatgtactagccacaaccaacggcaggaacagcgcttcctcctcgggggttgaataatccgtccgccacatgcgaaaactgagagtgagtaccctactttgatttgttgatttttggggcagaacgttgctgattattcggccccgtctcttttgatatttttgtcgccatttttaaggttcgactccccctattgcgatgatattgtgcctcacagaggtgatgctgtataaccgatatcacagaataaaaacaaaaggccacgtcaaacaaaaggccacgtccgctctcagcgcgaagagtacgtgcgaggccgcaagacggccaacagacccggactgcggcttcaccgacccgaacggcaagccgcagccccaccttctctcgccgcgagagactcgcggccctatctacgtgcgagtcctgactcgacgacaagaaggtgctgtacgcgggcgactgctacagcgagtacggccacatcatctgtgggcgacatgacgcacgacaagcccatggacttcctggagcgcgcacggactttctggagcgcgcactgcactaccgcctacacaacctctcggctgcctggttcctgtcgtacctgcacgccatcgacgcgtcctcgtccacgctggtctacggcatcgtggacgtcgtgcgcagcacgatgtggcactggtccaaccagatgaccgacctcgttttctgcttcttcgtgatccgcatcaacgcgtccgtgagcccggcactcgccatcttcctggtcaagcctcggacgccttcgacacgctcgattcgggcaacccgaacgagtccacgctcaagttcggcgtcgtgggtgtgctggccctgtgtgtgcctttcgtgcggggcgactgcgcggttggctcctcccagtccaagatgatatccaaggccacagagtccatgcagtcggcgctggagcgacttcgtgttgctgaagcgcgtgtcgagctgcaacagcggaagcgatgcgtgggaggtggctggcgagttgcagtcgagcaacgtgagctggctgaagatagccgaggtgatgttagcgctgcgcacgctacgtcgcagacgctgctgccactgagcgcattaaatgggctgggcgagttggtagacaacacaagtaggcttacgagcgctgtagcaatgataccgacgtccgtatatggttaagtctcaggccttaagccttagtcatatacggaactggcaccgcgtcggtatcattgctacagcgctcgattttagcgcgaatctagcgccttcaagtcactgttatagataacaccagcatctaaagccaaacattttcttgctgcagtaaaaagtcggaagcaccgaaacctgtggtattgtatatcttcggacatgatcgcatgtataagcgatcagagtggacatatgctattggtcatttcgggggtcgcctaaaagttattcacacgtaaatgcgatatctagagaaacattttctggaggtattactgctgttttttatatcttgatagtcggattggatcgaccgatcaatcggatctgatcgaaatgaatcgagaatcggcacaggctgattcgatcggtcagaaagtacatctcgatcaatccgattgaatcgattacccacccctaaatgcgtcagtgccgtaaccttcaatgtattacaggaaggaaacatgagctatttctgtgagaagacgataagcttgttctagcttcgacgtttattttggcaaaagtcatcatcatgtttagacatttgcagattttcacccggtctggataaaatccggtctctaaaaagcatctgcacaaaataggtttttattttagcctgatggggtagccaaacgacgcttaaccccttcaagcgaggtaaaaactctgccaaattctcgatataatagtgacttttgttgctttggtgagtgatgttgggatcttcctactatctgcagactaatgctgacgaagacacggagacggaagacgagtgtgagagcaaaaatgagattgaaatccccattaagctggagccgaacgcagaggtcgctgtgaagactgaaaatccagattttcgactgggtattactgttgatgtgggtgttgtagcacccgctacagttagtgctggaaagcgcgatgtgaagcaggaggttgatgcaggtcaaggacgatacgcagacatgcgtggaagtgccaaagagatggcgggaggcagtagtcaacacaccagtgccatccaaccaagagagtttgaggatgagctgagctccatctactcgttcatgatgtacaccagccttgctgtgtacgtaaagaggctaatcgccttacgactgctcatggtgccgacgaggtgttgtcatgcacagatgacaggggcatcaataagtggaggattagggtgcacgagtatgctctgctggcgaatggtgcgttcatcaagtatctagccattggagaggtctcagcagaagcagctgaacgcttcacagacgccgcgacgcttgtcgttgctcttttgattcgagacatgacgcaagagattttctttatcaagcgatttctggaggacctcagccatattgtcgacattgcgaaagattcgtcgttgcaacgggcgtggaaaagagccgcattgagctgtacagctactgcagagggagctttgtggactcgttggatgacatgtcgatctacgtgtcgttggtcgaaacgcattgcgacagcggatccgaacagcagttcccgctcctgatttcgctgttgcaaaagtttatgtgggactgcattagcttcaatcttgaacaggagtttggtggcctaccacgaacggagtctcagtggtcacgcttcaccgaggttggattggttttggcggactggatgcgcatgttttcgaccacgacaagcacgttcaaatttcagagcccctcgctcaatagtacgcggctaaaacagttcgaccgtcggttccccaacaagattccagaagctgtgtttgcgtaagtttcccaatgctgccactttttatttgaagcgctactacactaacgcgaatgcgtcgctccctttcttgctgtagaaattggcactgcctggtttgtggcagcatcgaagtacccgtgtataactggccggtattcgaaaccagaaaacattttgtgcgtggcatcacgcaaaccgcaagaagaaaacgcgttgcccctttcgacatcaatcctcgtgagataaagcgatagcaacttgcattgagggagaagctttcactgcagcggctccccacacaccccttcaacagtttctcgcggccgccgaggtggctaagcgtgcgacgcacagctcggtgggccaacaaaaatcgacaggcccgtctgcattaagcaattgggtctcagctatcaagacgctgttcatggtggccagtagagattttatcctgcgtgttcgaaacagagctatggatcacgatctgtgtactggatattttgaagctacggccgacgcagtcgcgtgtatgattacctgtgagaagcgcaacatgttcaaacgtgtgtggattatgcagtcaatcctcctgttggatgcgattcacaaaaccaaatggacgagtggtgatgatcgtttgaagatactcaacagccgtaacgctctcctgatccattacgagaatacctttcaagaccctttactacacctttgcccagccttagttgtctaatccccatccaaagtcgtcagcttttattttgggtgggagcgaggtacccgaattaaggggtaccactctccttagtgcaagcgaagtcgtctaatccgcaatcaaagttgtcaaaattgacgagagcctaacgtgaagttcccgcgcgcgcgaagcccgcaagatgcgcgccgttgggaatcacacttctcaatctaccaagcttcgtgcagatgccctaccagtccacgctcaagcaccactcgccagaggaacgacgccgcgtcctcgacgctttcaatgccggtgaggactggcgtgccgtcgcccgccacaacggcttcccacgcaccacagcggagtatctcgtggcccatgggcgcgtcgaaaatctacctcgaggaggggctacgagagctggcaagataaataggggaggcgcttgagctctggttggaggagtgctgcacgtttacactcggcacgctgaggtccatgatccgcgacgacttccacgtggacatctccgagtcgaccatgtcgcgctacctggtcggcaagctgtacacggtcaaagaggtgatgcattctgttttaaatatgttgtggtatggttgcttacaatgctcttactgctttgctacgcatagactcgtgtcgagcctgtgacttgcaacagcgagattaacttggagaagcgtaggctcttcgcggaggcactgatcaagcaccaagaacaaggtgacttgatcgtgtacttgatcacgcagcgcatggtgcagaagatggagctgcacgcggccaagtttgtcaacgccgcaactcgcagcgaggccatggtgtacggcaagtaagggcaggtgcagaagcccatcggtgcttactttgatgatgtgcatgtgtagcttttggtcagtgccaacttcggttgaggattagacgacttcgcttgcactaaggagagtggtaccccttaattcgggtacctcgctcccacccaaaataaaagctgacgactttggatggggattagacaacacaggctggacaaaggtgtagacgtcgaagcgtaagtgaagagcgtcgaagaacaggaaggtgaggaagtgtgggcgctaaaattgaaaggcattatcgataaattagcagataagctctgcaaagctggctcactcgtcctgctacggcaccaagttcccgagatcaagccgtggtccgacgaccagtggtttaagtttatccaggcatgctggttcctgatgaactggacgaaacttgttctaggagcgacacttccaccgccccagtggctaggctcgatgtcgagacttctacagcaaatcgagcatcaacatctaggacgactgcctaggcaactcgtcgcgtaagtacctttgatcaataatcgcagagaggtcccgcccggtgtatattctaactcgaaaagtgatcttgactatcgacgacaggttgtgtgattgcatggcaacaagtccgtggatcccagaagcctatgaaacgaatcatggcagttcaggcattcatgcacatgctgaagaagataaagctgcggccgaggcgagggccgtgacacggatcaagcgcattcgttcgtcagatgttcctgctgctcgcatcgctgctgcgcgcgcgatgatgaccgagtatttcaagaccctcacgcaactgcaccacagatggaccaatcgcgaagggaatgaagctcaagccacgcctatcgtgatccagagactcccagcgaaagcgcaaaccatgaatctccacgtggtggagtacatcaagtccaccgaaaacgcagacgaactcgcgatgatggcgtttggagaagccacgaagatgttggtgacttgtgttggtcgctttccacaagaactgcttctttgtgagttgatgcaggaaattttgggacaacagaaacgtatcctcgatgtgtcagcgaccacaaaagccattgttccactcgctgcgccactgacggagagctatgcgaggctacgagagtacagcgtagagatccacggtcaggaggggccattgaacaattaggttcatgatctcactaaaacatgtcgatcctcttaatgcaagttcctgatttgccaatccacaaagctattgggtcttagcgcgaagccactcgaaacgaaacgtaaagtccgcgcctatcacagcagaacgttagtactttatgagttgtgcattgaacacgtcacgcacaaattcttaccgagatgctcgagcttgtactgcagcaagttgacaatttccaggaaaatggtcgcctggatcgggtacatttgtgcctctaacacaaacgccagttggtagagcgaggagagtgcgaagttgcgctgtaagaatcgatgaagcagcagtagtgaggaaacctccaacgaggtgaagacgaaaatatttatcagcgccgagtgaccccagttacccgccccgccagggtagtatacaatgttcggtaagtactcgagaactgacttgtacaccgcgaatatcacaggcacaatgcactcgacgtattcaactagcagcagatattcacagtggaataggagctgcagcccttggcgaacgaaagcctgtgacggttctgcaagagcattttgcactgctgggtcctgcattttcatcgagtcaaaaggagtcggttgtggcacaacggacactgtttgcacaactcgaggggcaaaccattgccgatattgccggaatcgacttgttctccgtctagatattatttttttgtcgacgtaggcccccgccacttttaacaacttgagtttctttactctttcctccgtcaacggatgtggcaggcaggcccaaagccgcacgtctttcatcaattccacgtggaatgcctcagggttacgggtcacagcaagcagcattgctaccaaattgttgtccgtacttgatttcttgatgatttcacttttgtgctggaaattagggaccacttttaatcggatcagcttcagcacagcctttgcgttggtgcgcacttcttggaactcgagcaatatttgacccacatcgcctgcgataaacagcacagacaggtaaatggatccgcctgaagagatgcacacagagacaaagagtgcactgaagaagtcaactgtaaaggccaccatttcggggatgaagtcctccagctcgtgtgtgactcgcatcacgagatgcttcgccccgaatttccagatcggcaggactatcaacgcgccaactcgatactgcgcaggtaaaactttataaattgtttcgaaaagggggtaaatccctaccatagcgcagtatgcgaacaaatgataaataaatcgtcggaaatggcggcgggaaggcgagttctttttaaacggttctcggccaaacaccagcaaaatcatcgcagcaatgtatacgaccatggtcattcctccatactgccacacgaacggaacgggaaagccgccgaatatcccagctagtaggcaagttccaatgtagggaattgtggcaccgatggtcacaatcaaccgcttgatattcgtgaagtcgaggtttgggagaaacaaaatcagttccgagacgccaacgaaggttaatccaagcaccattaggctcaagcgaatccagaacatccaattggcagcccacccttcggacggaggtcgtagcggcagacattccagcagcaacgcaaacgtaagcgctggaattggagtgagtatgcacaccagtaacacacgagttggcgacgtggtcttgcagtagtggtccagactctcgaggcgctcgacggagtacgagccctgtcgaccaacttggacgcggttccagtcatcttcgagttgcttcaaaatattactcaacccgcgagatttcgataacttcttagaagctgcagcaccggtgtcgccttcgggcttgagaggagtggaggctacccgtgtcgacgacatccgtcgagtagtgcaggatgaacgcaaatgtgatcagaagactcagcaagtgctatttttcgcggcccatttttgcaaaaggtaacgctcgaggtcggtattcgtggttgcaacgcgtggcaggttgttgctttctcattgaaatcgccttcaacagaactcaatccgaaatcaacgcgttgaaggttgcattgttcgatcggtaggtgggcgatttcaatgaacagggaaacaatgccgtccatcaatccactttatacacccacagccacccttccgcactaactaaactggtagaatggtcttgagtcaacgcagccactatccgatattggaaaccgtcgagaatctatgcttcattacgatatatatgtagccatcttgaaatgattgctcggatctaggcccctacccctggtgtatgtttctccgatcactcgcttccactataccacataaccaactcaagtgaaatcagcggagaccaacagcgggcgcggagagagcgacgagcgaagacccaagcggcataggcagcgcgccgactcgagcgtctcgagcaagcccgcggtcccccacagcagcgagcagcagcttcccgcgtgcgcctggagcaggcgcgtctcgtggtgcaagcgcggtctctgtccgagcggtgcacgcgccgctacctctcgtcaaagcgtccactcgcctcccgcagcactttcctcggcttctagcgtcactcccaggccctttccggctccttcaaccccctagcagcacgcgcctcctctccaccgttcaggcgcgcgttcttcgagcccccagcgacctctatagcgtccaggagccgcagttgtagcctcgtagcattgccatggaggagagcgacgtgtacgtgcgtgaggagggcgaccgccccgtggagcactcgccccgcgggcgctacatccgcttcgacatccggctgggcatgggcgcgtacaagtcggtctacaaggcgtacgacacggaccagggcatcgacgtggcgtggaacgccatcgacattggcctgctgccgtccacggagaagacgcgcatcatccaggaggtgcagctgctgcagaagctcgagcacaagaacatcatcaacttctacggctcgtggttctccaaggagaagaaccaggtcgtgttcatcacggagatcatgacgtcgggcacgctgaaatcctacatcaagcgcgtgcagttcatcaagtggaagatcatcaagcgctggtgcatccagatcctcgaggggctccactacctgcacagccagaacccgccggtcatccaccgcgacctcaagtgcgacaatatctttgtgaacggtaataccggtgacctccgcattggcgacctgggcttgtcgacgcagctggcggtggacaaacgctccaaggcgcagagcgtgctgggcacgcccgagttcatggcccccgagctgtatgatgagagttacgacgagaaggtggacatctatgcgttcggtatgtgcgtgctggagatggtgaccaaggaggtgccctactcggagtgcatcaacccggcgcagatctacaaaaaggtgacggcgggtattcgccccaagggattgcagcgcgtggtgagtcaggcggcgcgggatttcattgagctgtgtctgtcgcgtggaaacgggctcgtggacgtgactgcgcagtacctgctgggtcacccgttcctcaaggtgcaggacgatgacaatgacatggtggagtgtttggatgaagacgagctggagcgtgagagcaaggaggagcagcagcgactggagaaggtggcggaggagtcgttctcggtggagttcaacatggagagtggatcgaaggttgccatcagcgaccgacggaaacagttcccgtcgttgtcgttggaaccggaggagatgtcggcggcgtcctccaacagtggtagtgcgccgggtagtgctggcagtgcgtcggcaccttccccggatgctgctgcggaggagaagactgctggaactcatcgaataattcaaatgcccccggttgtgcctcctcgtgacagcattactcagccaccttctccaactcccgaagcggccccaacagcgaccgtgatagcagcaccgccgcctgcagtggcaccagcagcaccagcaccagcagcaccagcagcaccagcagcaccagcaccagcagcaacgcctgctcaagtgccggtcgctcaggcagaagcggctccaacgttggcccattcgccctctcagccggttatcagtgaaatggttagtggtgatgaaccgctgtcatcgggcaagaagaacgccgattcacatgtggaccagttcctcgctacgctgcctggaactgagagcgccattcagaacacgaggataaacatcatgggtggaagagggcaacgactggatttggagaatgacgtgacaccggagtatgctgaaagtcccgcggagtcgcctgtggcaaacggtaaacaaactccggagcactcgcaatcttttgcagggcagccttcagtggccccggtggatgtaccgaaggtcgagccgcccaattcagccccggggcttttgacgccgtctcaagctcctcaggctcaggttccagcaatgcagcttcctgaacgtgatgtgcagcctcaaacgaacctcgtccgccgtgccagtatccatggagcagctgacgtggctgcagcagtggctgctgctaacgctgtggcggaaaatgcccctgtggccagtcagccatctccaccacctcctccccaggtgcctcagcagacggctagcaacgcgactgcaagaaagcgagtaaagcggcatgagattaaggctgccaaagacccggacaatgagcacagcatcctactgaatctgcgcatcatgatcgacggcaaatcaaaggaaatcaaatttccgtttaacttgttcgctgacagcacgcacgaagtcgcgtgtgaattggctgtggacgtggggattctcgagccggaccttgaagacattgccgactccatccgtttccttgtgaccgagggcaagatcaacaacctttcggacgtgcaggaagatgtgtgggaggaagcgccggagccgcattcgttctcgtccaagccgattcctaacgtgtccaagatgtcgtttgtccatgtaccaccgcctggttcgtatcagcagcaagcttatctcatgggtgctgcggcattggagcgttcagcgagtgcgtccagcacctccgcctcgggagtaccggcatccgtgcttcagagcgtgctcggcacaagcggcgccgcaggagctaccacgggtgcgtctgtggctggtcaggagcaattgaaccctgccgctctcagtgacccgtcgtctacggtaatggtgctggatgggggtgtttctgtccccccactgagtactagtagcagtaccagtgcgctgtcatcgttccctggctccgaagtcggtcggtcgccgccacgccctggcctcccgcacgctggtagtgagtcgacgctgacgaaggaggcgctgctgaatattttggagatgcgggcacggggagtgtcaatgggctcgatcgccgacccttcctacgttcagcagattcaccagcttgaagaccgactgaaaatcgcgcggacttcgtttgacgagcgggagtcgtccctggaagctgcaatccgtagtgaggaggaaaagcaccagcgtgaaatcgagcgtttccgcaagaagatggaggagtttgacaagcagcgtgctgccattgctcggcagcataacggtggcgacagcgctgttttcagcgaggctaatggctcatcatctaccgcattggacgaaagcctccgactgcttgctcagggcgagtcgcttgcgaacgcgagcgtgcagaacccgtcttcaatgctagtggagtttgatatcgacgtgggtcttcctgttgacggatctgatgaggagccttcgccgccgccttcgggaacgacaaccgtgcctgcgcctgccagctcaggagctgaaactgtagcggcgcccgccccagtgcctgtggacgagctgatccccgaaagctacttgcagtcagcggcacaaccggcaccagtaaatgacacgacgacgacgacgacgacagcaccgacaccgacacccagtcaaccgccgactggacagtcgtagtagagagcgcgcagctgtgtgctagcgcaggttggccgtctcgtgatggtgctgtcaagtgctacttgcttagattattcggctcagtcgtgtgaagccatcacaagcgcaatagtgctagccgcaagctcgccacgacccggttcgaagggtatttagcgggggatagcgaggtgaggcgagaagagatggcggagcaggaaggagggggattcgtcgtgttattttgatgggagggacagctttggtggatgtgaaaaatatgaattggcagcccgactcggacgtttttgcagacgtttgcctgtcctcgttttcgatgcgaaaagcacctcggtaacttcgcttcgccattcaccccccaaccaatacatagaaatatgcgcgatgcatatgcatttttgattctttacatctcccgacagtttctcacttgctgtatcccatatttttagttgtgcattgggggcgagcaatgcggaatgcgtgggtttgcttcgtgttgcttgcagcctcgagcttcatcgtgttggcggcagcaagttcggtaaaggtacggatagttcgatacgaactcttgtttcttctacccgtgctgagctttgggatcggtttggtcaggccacgtatgggatctacggggcgattcagtcgctggatacagcgacaacagtgcgagttttgctgcagcaatgctatgctgggtttgctctcaacgggtgcaaggacttgaacgcgagtgctggtttccacaaggattactcgttcgagactcagttcacagatccgagtctgatgagccgtcagtactgcttgcagtgctgctccacgcctgtgcctcttactggggccgacgagacgtggaatttgtcgtgtccgctgaacgatctgcaacgactgagtgtgagcaaaggtcgacggacgtatcggtttgcccggcgcaatactctcgacgacgacacaatcatcgagtgccccatgccgacacgaaacctgtcaacgtatttgagtgggtacaccctggacctcactgtgatcgagcgttcttcaaatttcggagtggagtattggcggagcgttgtggactgctcggtgaccataacggagagtgaggaccctcccgacacgttcagtgaggtgctgcatcttcggtcgacacccactccccaagatcggcctaccgcgtggattgtacctaccgtacttgcatgcctcgcgatggcaggagtcatggttgtgccgttgtacaaaggcaagtttcgtggacaacggtgtctgcactgcgggtcgtggatggttgtgctgaatgggatgtgcacgatctgcatcgtgatcagctgcagcattcacccgccacctgccaagatctacgtcacgaatggcaagcccttcactcacagtgtcagcgagcagccgaaacaaccgaaggcacctgaacagcaagggtctgcgatgccttggagacaaattttgcaatcagccaaggcgaggattaacaaacctgccgatacgaacacaactacactggcatgaagtttcaccttcttcacctggcatgaaattaccagctcacagttgcattttgttcatcaacacccagaatttaggacgctaagcgccacttacatgcgcccttgcctcgccttcgtcgtcggcgtagcgtcaatttggtccagctccggcagcagttcctccagctttttccggtactcaaagtcttgagcgatagggttacgctccaagtagagcgtgcgcagaccagcaagcggtaccaagtgttccacatcggcgtaatgtgcgacgtggttatcattcagccagaagtcttccagctgcgtaagaggcgccagtccggtcggaatagccgagatgcggttgccagccagatccatcgtcgtcaggttcgtctacaaaacaacccaaagaaccagttagctccacaaactaatcccttcagagctcaatctacagcatcctaccaaatgctccacgttctcgatcttctcaatgccgttatgactcaaatacagctcctccagcgccaaattgttgtccagccccttgataaccgtcacgcggttgctctgcacactgatgatcttcaacttggcgagcttctccagtccctggatggccgtgatcttgttcttgcccaaccagagctgctccagctccgtcagcccctccagcccttcaatggtgcgcaggcggttggctccgaggtccagcttcttgagcgtcttgaggctctcgatgcccgagatcttcttgagcttgttgttagccacgtagagctcctccagctgcgtcaggtggctcagatcgggaatcacgcggatctcgttgaacgacaggtccagcaccttgagccccgtgaggctcgtgaggccctcgatggcctggatctggttgtcgtacagctccagatgctccagacgcgtcagcgtcgccacgctcgccatggagcgcagcaggttcgagcgcacgtgcagccgctgcagccccgcgagcttgtcgattgcgtccaggtgcgtgaccttcacgcccgccgtccccacgtagtagagctcgtcgtcctcgatggcgtccaggtccacgcagctggagagcgtcgcaatcggccgctcttcttcctcctcttcctcagagtcgccgtcctcatgcttggactcggagttttcgctcttcttggcggcctcgcgctgctgctggcgcgcgtccatggccgcctgcagcgcgtccgtgttcacctgcttggccggcgttatgctgctcattgctattgtttgtttggtgtcaaatgtcactaaggaggttcttagcgcgagggaacgagtggtgtggtacacagcattgtagtacagtacagaacggaaaccaagctgcttcaatactatcaagtgtatgtttcagtctaaattatagaggttattttagagcattcttgactatttaggctatgcgatttagtcggttattgtatgttcggtcttacactggcgttttctagggccgtgacgtatatagatagtgctgtgggaagaagccaattaccgccgccgcgtaacagcctgcttgctgcggtgcgaccatggaggggatgcttaactacttcgtgccggaggacggggattcgtccgaccacctgaacgtggtgccgctgccgcgcgtggaccagctgcggctgcagcacgtcaagaaggtgcactcttatattccacctagggaggggtctctgcgagcctcactaacgccatatttgctcttatttcgtgtgtttagagcttccctctgcctggcgacttccacttccgcttcaaaacggcgttcgagggcacttacggtgcgggattagggtcgcgaacccacctacacttggagagcaatcgcaacgagagctgacctggtacttgtgcagtgtggctggatgtcgtgaacgacgcggacccggtgccggacttcaacggcctcgtcatctgcaagatctcgaggatgcagcgcgagagctcgacgcgtccacccgagaggacggagacccccaaggcccaagtggagcagccagacctcattgagacgtcggaactccctccgtcgcctggtacgcactgctattgattcgagaatgtgttagtcttattagtttcactaatatgctggtggtgaatgaccgtcatctgttacagccaagcgggaggagcctcaagtggcgcagaagactttcaacaacgacctggttggtctggtgcgtgcagtttgttggattataaaaggttgatgaaggtgtggaacttacagattgttgtgcattttgtgttccattgcagctgtcggacccggtgcccgcacagacgccacaggctccttcagctccctctccagtcccgccggtaagtgttagtgcttctgacgggttcgccgtatgctatgccgagactgatttgtgtatctttgttgtttctctagccgccgggtgctgctccgttcgatgtgtttgccggcaacaacaccgcgcacatgcgaccgacgcctatcgccgccaatatgggtgcaaacaacggaccccgaggcttgtcgccgactacgaaccatgctggagcgtacggagctcaaggaggcttcaacccgatgggttctggcggcccgtcgcccatggctcctcgaggtcctagcggcatgaacattagtcagatgcacatgggaatgggccagccccagggcggcatgcagcagcagcaacagcagcagcagaatcgcttccagggcctccagtggcaaggaatgggccagcagccgcagcagcaacagcaacggaaccccaacacgaggcagtggtaaccgtggctcgaagcgatcacacggttcgagtaccgaggggtggagtggcaaaatgccaggtccgttgccaaaatatattgaaagtttccacatatttcaacactactcgaaaccaaaacaacaccatttcttccccagtgggtgcgtgcattttacaagggcgccaactcaatgtttttcaaggcggcagacccccacgccagaatttctggaagaagcaccatatcgtcgaagttgtcacgacgatttaatatatccaccaagttgtagctgtaatcctcagttcgctgggaatgcaaaaataacagcacctcaaagtggctgcccctggcggctctgctcaaggcgtcacttatccagccctcgcttcgattcttgtgtagccattgaacaactttcaaatgaccttgcgcggcagcaccattaatcgcctccgtgctgcaaccttcaagtcgatggtggtgtagccatttcacgacatccaagtgtccgtttgttgccgctgcatccatcgccgtcgtcgtacatccttcgttgcgctctttgctcagccacttgacaacatggagatggccattttgcgctgtgtcccgttgtgattttcatgcaaccacttgaccatatctaaatgtcctttggctgcagcagtgtccatagcttcgtctgtgcatccttccgtccgattttcatgaagccattgaaccgtttcaaggttgtcctctgtcgccgcagaatccatagcgtcaacagtgcagccctcggaccggttgtgatgcagatactgcacgatttcaagatttccagcgctagcagcgaagtccatagcatctgcagtacaagttataccgcgaccactccaggtgcctcctttccgttgtgctttcccaacagttctttgtttgtctttcagagcttttatgtccaggtcaagctggtggaaatactgcaccatagcgagattgccgttgtaggcggcagcgtcgagtaccgtgctcggctctcccgtgaagacgtgtacaggtgcaaacaaatcaacgtccgggtcgtcggagaattgattgaatagccactttgccgattccagttctccgcttccagcaacattcagcagtgcatcgttgtagcaatgaccaccgtccattagatcggagtgagcctctagcactttcgcagtgtcgaggcactggttaaggatggcagagtcgaaagcgtcgtgcgcatcgtacccaattctgtggccgagcagccaggataccatctccaggttgcagcgtctgtcatcgccattgctccatcttccgtgaatccgtgctcgtacatccacttgaccaccggaagactgtcagtaccagcagcagcaccaattgttggattttcatcgaggtgccggtcgaaatcattgcgcatcagccactccattagcggaacgtcaccacttcttacagccgcgctcatgataccccccatgtcacgaggtgggtcaacaaccaccaggcgacgttgctgtgtccgttcctagcagctttctcagcatcttgccctccccagtggacggcgtgtctcccaccaccgtcgagtttctctcgtcccgttgagaccatgaggaaaaacttcaacaagtccagcttgccgagctctgcagccttctctaccacttcgacaggcacgtcgcaatccgcgcagtgttcgaacagccacctctccagatccgggtactgacacgcagtgctcacaatttccagcagagactgccggaactggaactgcaagtagtggcgatctgtgcgaagataattgcggacggaccacgcactgggagtgctggcattaatttcaagtgggcaactttcccagatccgatccagcagcttccgcgagccgatcttgcacgccgccgcgagcgtcagctccaccgagcagtccaaaaactcgctagtcgatgcaactacttcctgcagcccagcaaacaccgccttgtcctgaaatacctgctccacagcacgaagaggtcgaggtgccgccatgcttctattaataaaacggaaggaccaaatatcagtggaagcgcaacatgggtacgctatcattgtgctctaatgctgtctagatgtgtacctacttctctcctatataaccgctcgtttatccgacatgctctccatctgagtgtaaaagtatcttgaacggctcctcaacagtctcctctcaagtcggagcaatcggcgtcgagtctcctctctctctatctcccggtggccatggcgatcgagccgtctcgctacggcccggacttccactgcgtcacggtctctcgagacgtgttcgaagtgcgctcgcactacgtgaacctgcgtccggtgggcggcggctcctacggcatcgtgtgctcggccgaagacacggtatcaatccaccatcagccctcgcagcgccatctatcattgctccactaaatactatctttatgttatctactattgtagttaaggggccgcaaggtggccatcaagaagatcaccgacgtgtttgacgacctgacggacgccaagcggatcctgcgggagatgaagctgctccgacacctcggcgtgcacgaaaacatcatcaacgtagggcccggtagagtcgatagagcacacaagaagtgggggtgctattatactgatagggatgttgacgtttggtgcagattctggacgtgatcctgatcccgcccaacgtcatggacttccacgacatctacatcgtgacggacctcatggagagcgacttggagcgcatcatcagctcgtcgcagccgctctcggacgcgcacttccagtacttcctgtaccagatcctgcgcggcatgaagttcgtgcactcggggaacgtgctgcatcgggacctcaaaccgtcgaatctgctcgtgaactccaactgcgacttgtccatttgcgactttggattggcccgcggcgtggagacggctcacaacgaggatctgacggagtacgtcgtcacgcgctggtatcgagccccagagctgctgaccgactgccagaactacaacgacgcggtggacgtgtgggccatcggctgcatcttcgcggaaatgctgcggcgtcgaccattcttcacaggccgagacccgtccgaccagctgcacatgatcatccgcgtgctggggtcgcctacagaagaggaaatgagcttcgtgccccatgaagctgccaaacgagcgatcctgcagcatggattctacccaaaggtacgtcggagctcaatacctctcgatagttgaccattggtctctgttggtgacttaatgagctatgattctctggactagcgcccgttgatcgagtttttcccggatgcgaacccgctggccgtggacttgctctctcagatgctcaagttcaatccggccgagcgcatttcggtggttcaggcactcgcacatccgtacttggcgcagctccagaacccggtacgagttggtgttgcatcacaaagttggtcgttgtgttagttttgctaacttttatccattgccgccaggcggacgagcccgtgtgtgccgagccgtttaacttcgatttcgagcgcgagtcgctcgatttgggcgtggagatgcccaaggaggaactgcagcggttggtcttccaggagtgtatgtccatccaccagttagaagcgcaccacatgcagtgagatgtggtcgatcggtgccgaacgaaggctcagcgactggagtggctgcacaatgtcaagccaatcaactgagaggacaacctgccaccctttaggtgctgtagcgagcagcgccgctatgtagttcatgtacttaaggccaatacccgcatgcttctctttcttaaacggaagggtcctttgaccctgcgcttctggcagcaaggagtggatgctttgagtcaaagcctttgacacgcccagcaagtgcaaagctgtctcactcctcagccagcgagctgcactgacaagttgccgcaagcgttcctgtgtggacagattcctttgatcaggtcacgcgctggaaagatcgggtgaaattgaatccagtcgtcaaggtcttggggaccattaggaagccgccagcgccacgcgcatcacacagcgaatgccattcgccgaatggtccctcgagagcgggtgacgcgtaaacgatcttagcatcgatcaagtgagacttgcacacgattgctgcagccatcttcaagcctccctctaatcccgggcatgagcgcgcctggtccgaaattcggactccgaattgagcagcgccgttcgagcaagctgcctgaatgggggactgcaacgatgctgcctgcacttgcttcaacattctagttggtgaaaacagcgaattatcacttcctttttcgccagcacgcgcaggctcttgcttagtgcatatacatcttcttatattcagctttatacctagcaatggccgactccaacgtaacactgtccagcagctcacaacgtctccatcatcgcgagttgacatctaaaacttgtttatagtgatagtgaacatgtatatttggagaggattcgtgtgaaaacttgcctaaacacatacacaacaatttctagttgaggagggacttcaaaaacggctgaaattgtatcagaggtcgaggagggaacagcaagcggtaccacttgaagttcgaaatcatcatgatgattttttaaatcaaccacctccggaggtggttgattttgaaaatcaacaaggtttcgccgaaataatcaacatcaaatcgccctaaaaatcagcacgttttttgccaggttcgactccccctaatttcagccaattatccgtgtttcaccagcgttgtcgaatcgatccgattcgatccgatccaatcggatcgagtcggaattgatctatacatcatccaatccgattaaattcgatcacgatctgtcttgatccaatcgatcgaatcggattgtatttttgctacccatccctagacgcattccattctgatacctcgtgtaagtaagtggagcgatgtccatcaaaacagcaagcaagaatctgggtagctgggggagaagctcacgtaacccaagtttgacagccttggcagcggctcgaagagcggtggaatgatatccaagtgggccgtcaaggttcgtactccgtcgagcgtcttgagagtttggcccactactgcaaaaccacgtcacgcactcgagtcattctcgtttgcgtatgtacgccattaccgacacttacattcgtactgttgctcgagtgtttgccacttcgacccccatctgaagggtgggctgccaactggatactctggcttcgcttgggcttgatggtgttcggaataacctttgtagggatctccgacctgatcttgtttatcccaaatttcgacttctcaagtcgcaagcggttaattgtagcacttgggtgcgccgtgggctacgtggggtcgtgtttacttggtgcagcaaacgatatcgttgggttcccgattccgttcatttggcaatttgggggtctgttgctcgggatttttctcccgataatgggttctaccccgttcgcaagcaactcgtcgttccgtccatacttcgagaaatattgtaaacttctttttggctttatgacgcttgccggcgtatttccgctcttcaaagttttgtacgacctcgtgcctgtagcgtatcgaggcggtgctctgatcgtactgccagtatggaaatttgctgcaaaacattttatgatgtggtcttcgcgagaattcgtggatttcattcctgcggtggtctctctcactgtcgatcttttcagtgcgctctttgtttccgtgtttatctcctctgccgggcctctctatctttcatttctattcattgcagtatgttccgctctgggtcggttcggtccacgcagtgaggccacgacctcgaggaagactgaggaggcgaacacccgcacggcttgacacgcacttagtagatattagactgagctcctactcctactgctacacatgcacgttgggcagcgtctccagagctcccaaccactcgttgcacttcaactcctgtcccctgctgtcctcctcccaggaccttgtctctccttccttcggcttcttccagggcagtgtccgcaccgtcgctcctgcgacgcctcctccagtgcgccaacgcaccaccgtgtgcgctaacggctgcaaccggagccgattcataacacagtagacctgggagaggctgctctggaactccgcgaagtacaaacgaatgcaaccgccgtattgaagaatcttcaggatcaaggagattcctccgattcgtgtcgtgctaaagcgaaaaaactggataaaagctcggagaaacctgatctgctggcaaagatcactgcggtgactcagaatccgactgcgtttgacgtggtatcgatgaagcgtactcggttgtgggcgtgtttgccgcacactttgaccagtgatcaagccaaacagtttagtggcgttagaggcattgggtttataccgttgaacaggtctcttatcgttacgaaaagcggatggattccgtcgtaagccccgccaccgactattgaaaactaagaaaaatgcttcaatcgtaccagagctcgccagcgtcaagacagaatctaaacacaagtcgacaagctcggtcaaaaccaaatctaacgataataagactaagagtggtgaaaattcgaggcgattggtggtgcagagtctacaactacttttccattgcgaatatctagcatgggtggagtacgttgagtgtgttgttccgctagtgttcgtcacatacaagctggtgctccatcagcttcctaatgctgcttactaccccgatacccaaggtgactggaacacagcagctctcatcaatatgctggtgtttgctgctctcgaagttgggtcgcttctgctgttgcatcattctctccagcgcaagtttgccttctccccgttgtatcagcttgcttttgcgcttgaaacgcaaatgtttctggtccaggcaggtctctttctcgaaattgtggtcttactaccgtacgagctggtacatttcggtaagcgatcttcttgtctatactacatcaatgtacttcgaagtaaagtgctaacgtttgtaccgtgctcttttggtgcggatttcacttttcgttttgaatggctccgaagtctccgaatttctttatgatattctcgtcatcgtgtcactactgacaatcatagatttttatagcatctcctaacataaagtgtacgctgcatgatcttaaaaacgaactgcgtcaataaatagccacccccatcataaacattgacatctgaagctgacttcgtgtttgtccaggcgaaacaatgccagcacgaatagcaagtgctcctgtcactgagtgggctgaagaaccgagcaaggcggcaggttctagcaagttttaacgcgtcgcactgtgagggccttgagtcaaatcgaagagcgattggacagaattcaagtaggtcgacagggctcatactctgtcgagcgcctggaaagtctggaccactactgccgaacaacgtctcgaacgcgcgttctgatggtgtgtgttcttaccccgatccctgcactaagtttcgctttgctgctcgagagtttacctttacgaccgccttccgatgggtgggctgccaactggatgttttggattcgcttgagcttgatggtgtttgggttaacctttgttggtatctcggagctggtgctgtttcttccgaatctcgacttcacaaacaccaagcggctggttgtatcactaggtacgaccgttccttatgtgggatcctgcgtgctagtggctaggcgtggttggttttcctgttccgtttatatggcaatacggaggtatgaccagtgatggccaaaaatgtatgggaaggcattggaggtaaagcgatctgtagcaatatgaattgcagtaccaaggcagcagcaataataactgcaatactggtcgttcttgcaataattactgccatactataaccatactactctgtcgtcgtagaggtacatatgccgtcggaactgggttttgagaacattattatcttgacattgacagccttgcctgcttctaagtgaaaagtactagggtttgaagagtttattcggttggcttaagactgcagtaagaattgcaattccgcagcgctctgcaatatgtattgcaatagcttgcaagcttgcagtatggcattgcaataagtattggtaaatgccaatacctgcaatacatttttggccatcactgggtatgacagtaggagcgtacgtggcagcaatgattcttcttgtctttggtcgccaaccgtttgcacgggactcgccctcacgacatcacctacggcaatttctcaattacatgtttgcttacttcgctatggtaggagtttaccctctctacgaaataatttacgcacgtgtaccaacagattatcgagggatcgcactcgtagtcctcccgttgtggaaattcgcggcaaaacatttcgtactcgtggtttggaggacttcataccagatagtggcttttaccgttgacttcttcagcgctctcttcgtgtccgtgtgcataacgtcgaccgggtcgatctacctttcggcactattcatcgcagcagacgtggggcagactttgctggtattccaagaagtgcgtacaaacgcaaaagccgtcttgaagctccttcaaagcaagcaaacgcctccattccgtgctccggcgagcaatgacttgatagggatgctgctggcggtcactcgaaatcccacagctttccagctagaatccatggatggagtacggctctgggcgtgcctgctgcatccgatgactgcagctacagccaacagactgaagatgctgaaagcttccggcacgtacggtcagcggagacttctctccagacgaagaacaagtcgatttcgtccataccgccaatggttcgcccctcgacccgcagcgcaagcattggtaacaccggcatccttgaccgacagtgcatccagctcagcagtacgatctcatgtgggtccaactcccaaaactttcgttcgccaaggactgcagcttcttttcccttgcgaatatcttctactactcgaatacgtcgaatgtgttgtgcccctcgtgttcgccgtatacaaatccatcgccgagcatttaccaaacatcatttactaccctggcggtgcgggcgactggagtctgtcggcactgattaatattttggtgtttgctgcaatggaggcggggacgttgcttctgctacatcgatttttagagcgccagtttgctttctcggcactccaccaactcgcgttcgtgttcgaggcccaaatgtaccccgtcccgtgcaagcgacattattccttgaaatcgtaaatctgctgcagtacaagcttgagcatcttggtaagcatcccgtacggaaaattaacagcgagctgtcaaacataacgttctccttcgtactctaggtgcggattttactttccagttcgagtggcttcatcctagaaaataatggagtcctctacaattgccagtggcgtcagcacagacgtgatattacttactgtaagatctgcttgtactcctcctcgagtggcttccccgatactgttttgccttgaagcatcatcaaaagttgctcgctgaatgccgaacctcgctgcttctctcgtctgcaagtagtggtccaagataacagataagttataatagatgcatgcttcgtcaccaattacgtcaactgggcgtacctgatgtcatgttccagcatctccaaatcgcttgctctcttgtcagctgcgcgaatttccgttgcctccggaagctcaagcggagttacgttgtgcgtttgcagctttaccgggacatgcgccagcggagggtctaagagattgcgcatatccacatttccataccaggatcgccagttggactgcgttttaagcgactcaaggaacgcgttcttcttcacaactgatgttcgccttttgggcgaagctttgtcgattccacgaggtgtgccgctgtggagctctggagtcgagatgtcgccactatcatcatcactgctgccgtcgtcgttatccgagaaatgaactgtcttcataaaattggcagagcccttggacaggaaccacgaactcagaggcgtcgttggcatggttcgacgagcagatgatgcagtattagatggaggcgccattccaaaagatgcaccccaagcatttcgtggccgtggcggcagagccacagccagttccgccgactgatcccctcgacaatcaccactattcgccatcagctcgtcttgcatcagcttgtgcacgtacgagtggctgtccatgatgatgtccaccttcctagacctcggagcggtgtcaggagaagcattttttactggcagacgaccggtctggctcttggtcggagctgtcacactgggcgtcactttcggattgtgagggggcttgagctgcttggttgcgtccgccgcggtagcaccagtaggcgccgaaactatgttgttggctggagcctgtgccgcgttctgagcaagatgagggacctttcttactggtggtgttaaccgaccacgagcggttgtcctttccttctgtgtgtcctggattcttagtgatgtgtcggttgatcgctcactttgagacgttgatgccatttgcaaactcggtgtttgatctgaagagcagcgcggtgtatccgtgggagtccgcttgtctctggaatcacttcgcttagcttgtgccggctgagaaggagcagcttcgcttgcaacagcactccttttaacgggcggctgcagggtggaggagttcacggacccctggtcagtagaacgccgtcgcttgaggccaccacttggcaaggcagggctggagggcttcgctgtcaccgaccctggcgaagtgcgtgttgaatcctcttgagtcgtcgttggagtggctacaacggtctcatcaacaggtgttgccggacaagcctgtgcaagaccgtttgctgaggttgacactgatccgtgagattcagatgcaactttagcggttgaggaacttgtaccgctggagtcaccatgggctgcttttgaagaatctgaagcgccaacgacgggacgagatgctggctttgaaactgccagcttatcatcagctgcgattgccgaggcggtcgtagcagcggcttggctaactgcagtcttcgtagccttgcgaagagtggtcgccgcttcattagtcgacgatgcgttgggagacacgtcacaagtcgtgtttccttgcgcgctttcaggcaactgacgattcgttggagaatgcttcactggtgtatccacctgtggcaaaaccccaagcaaaaccaaaacaacatcagcaacaattccaaaaacctgcaacagttagcgagccaagcagcacctgagcaatcgtgcgactttgtgtcgcagtgtccgctttcaacgatgtagccgctggcgacttgactacgacgacaggcttctgctcctgctgctgttgctgctgcaccgctttcttcgtagccactatagcttctccctccaccgcagccggtttcttcgcttccaatttctctgcagctacttgaggttctccttttgccttagcgggagccccagcaccaacagtcttgatatcacccggagtttctgtcttcgctttcaccttcttaacgatcttgcgtgggctagcagccaagccacttttcggcgatgcagtggtcaacaccacgccagcctccttctgaacatgctgcttttccttcgtcttctgcgacgcacttcctagctgcaaataaataccacagaatccagccgcatcgtcaataaattcaaagccacagctaaccgtgccagcctcttcctcacctgtgcgatcttccgcttgggacttgtcgaggtcggcgtcaagctcttccccttggcagccacagacggcgacgtagccgaagctttccccaccagcaccaccgtcttcttcttcacctcggcaaccttcttctcctttttctcctgccccttctcctcactcggtccctcctcagcagcagctgcagcaccggcatttctcttcctcttcttcttcttcttgccgcccgtgagcgacaccacgtgcggcttcacaacggtcactgcagcagcagcagcagcagcaggtggaggcggcgtcagcaccgccacgttcttcgtcttgggcgacacggcagctgcagtggggggcttcttgtgcggctgcttgtcggcctccgcctgcttcttgagcagcgctccggccgccgccttcttgagccgcttgcgcttggacttggtcatcgtctgctcgtgtgcagtcgcctccgcctgagcgctcgcagtcgccggcgacgccttggacacggccaccacttggccgctggcgtggctggcggccgctgtcttcccgctgtggtgcggcttctgcttgtgcgcggcttgggctgctagggccgcttgggcttgagcttgcgctgcagctgccgccgccttcttcttggtcgccttgaccttcttgcccttgccacggccgccgccgcgtccgccatccatggcgacagaatagattaccgcgctatgggcagggttcctagttgggtttttcgaaaatgggttaccccaaaaagtacaaccaaccaccccaaaatgaaaaagtgtgggttatgtttttttcgcatcttgacgcatattaacgacatatttcaatcaagttacacaataatacatgttggtagaagtaatatatagtatgtcacaggttttatgtgtgataaacggtccaaagcggctaggtaacaaaaaagccataccggtaacccaaacaccccggagggtgctctcacccatccaatttctgtcaaaaacccgggttttccagaaccctggctatggggtctcgtcttcggatctctataaaaaaatgacggtattttatcaatggtacccaaatattggtacattttgcgaccaggtcacttcaacttgcctcatgttctgcgcgctagtcatgggggcagccagcgtcgggccatccgtggaggaggcaaagagtgctcgcgcaagtgtaaatcggccttcgatctggcatcggctggggcggcgatggagcgacctccagatcggacgtcaggggtcgtactccgtcgagcggctcgagagtctggacaactattgcaagacaacgtcaaaaactcgagccatgatggtgtgcttactcacaccattacctgctttgagtacggctgtgttgctggagtgtttgccattgcgaccgccgtccgaagggtggaaggcgaattggatgttctggattcgactcagtttgatggtgttcatcatttgcttcgtggggatctcggagcttctcacgttccttccagacctcaattttactttgtgcaagcggctaatcgttgcttcgggtaccagcgcggggtttatgacggtgtgtttacttgttgcggacacgatcgggttccctgtgcccaatacatggcagtccgcgggggtcgtggagggggttctagttcgtacgatgattctgctggtctttgggaccaaaccttttgcaagaaattcgcggtgccggacgtggggcagctgttgcttgagttccgagaagtgagcgcgcacgcaaacactatactaaagatcgtacgaacccaggaatgtgctcaaacaccagtgaataacaaccttctgacaaggttggtggctgtgacccgaaatcctagagcctttcaattgcaatcgataagtgatgtacgcttgtgggcttgccttccccaccctcttacatgagaccaagtcactcaactacagcttctcgaagcgtctggaatctatgaatgtattgacgcctcgtcgcgcagaaagagtcgagctcgaccccggcgtcatccggcccatgttggaccgcaaagtgcagcaattgtagcttcctacagcaaaacggacaaaggaggtttggtcaattcctcacaatggaaggcatttgtcttggagggactacaattgctcttctattgcgagtgccttctgctggctgagtacgttgagtgtgtcgtgcctctcctcctcgtgacctacaaggaaatccttcggcagctgcccaacgccatttactacccggatggagtaggaatctggggtacaagtgcaatagcgaacacgttggcgttcgcagcactggaggctgggtcactgctgctgttactatatttcctgcagcgcaagtttgtattttcgccgctgtatcagcttgcattcgtgctcgagacacagatgtacgttatccaagcaagcttattccttcagattgtggttcagctgcagtatgagctcgcacatttaggtaagtggtgcccgtacctgcatctgcgatgattttctattagctgttgacctggattctgaaaactacaggggttgatttcacattccgcttcgagtggctttacgacacctagattcgctgacttcgattgaagaaggcaatggctgtacgaccgacaagctgtgcatagtcaaaataataatgatggtcagtttgtgagcactccgtcaattcgttcaatacatccacaatcacgttaccaaggatagcaccatccacctcgcgctacaggaaaaatgttcggatcggagggtattgatcttggtatgccgtgcggtacactataaagaactctacatgaatggatgcagtatcgcttcattgtacgaactactgaagtatgcttagactgcattatcgcgaagccactcgaagcgaaacgtgaaatcaacccctgcagatacgatcacgatagaacatccattcactaagctcgtcgggtgtggaaatgtaataaatgcagcaatggacactcacccagatgtacgagctcgtactgcatcagagtcactaccttgagaaacaggcttgcttgaatcacatacatctgagtctccaacacgaacgcaagctggtacaacggggagaaggcgaacttccgctgcaagaacatgttgaatagaaccagcgatcccgcttctagtgctgcaaacaccaggacattgaccgctgcactggtgctccagctttctacaccaccaggatagtactctgcatttggcaaccagtgaaggatcgatttgtagagcgtaaagatgagaggcgacgtattcgacttgcaccagatattcgcagtggaatagcagttgcaggccctgtacgacaagccccttcgccttgttgtatgtcagcaaccgcgcgttcgaagctccgactgcgtcctcaggaggtgcgggtacgatattgttccgagttagtagacgacagatgcaacagacacttccctgtgacttgcagagactttgcgtctgtctgtatataccagacgtttccagctctcgaatccgactttcttgctctactgtaggcggatgcgggatacaagcgcgcagccgaacatttttcagcgaagttatgcgataagaattaggatttctagccacagcgagtatttccgccacaagatcatgatttggttgggagttttgtggctgttgaagaagttttacaaccgtgtgcgcgtttgctcgcacctcacgaaattccagcatcacttggccaatatcagctccaatgaacagcaccgagagataaataggccccgacgcagaaatgcaggcagaaacgaagagtgcactcaagaaatccacagaaaaggcgataatctccggtataaagtcctccatctcacatgttgcccgtataatgtagtgttctgcagcgagtctccaaatgggaagaaggacggtagtgtatccccgatatgaaggcggtacgaagtcgtacagcactcggaagaacggatataccacgataagcgccatgtagaaattgaacgaatcgttgcaagtgcacgcgactaggtgagttctttgcaaaagcttttcgaccaaataccagcagaaccaacgctggaacacagcctcccagtacaagacctccaaactgccacacaaatggcaccggaaacccgacgaaacttgtggctactaagcgtacccccatcaatactgcagttccgcttattgccacaaacaaccttttgccaagggtgaatttgagattggggagaaacacgagcagctccgtgatctccaccaggcacaatgtaaacgacatcaagccgaagcgaagccagaacatccagttggctctccacccttcggtcggcggtcgcaatgggaggcactccaatagcactgctgtagccaacgcagggagcggtgtgagtatacaaatcgatacaactcgagcctgggacgtcgttttgcagtaatggtcgagggattcgagccgttcgaccgagtacgagccttggcgtcctacttgcagattattccacctcttctccagttgattccatgacaagcttctcgacagcttccgggttcttagctgtgtgtgactgtcggggcttacacgaacaggattcatgagctgtgagaagaggttggcaaagtgaggtaagccttgtgcgcccaacgtccacgttgacatctttcgcatgaaaatagcatcctgtttaaaatacattggaaggtgtttgttagctcgcaaagtagaacaagaacttacatggatgcacctccaagctgtacatgtattggcagatcgcagcactggcgaacaggttctgacagccaggtggcattgctgcatcgtgcactcgtcaagggtcttccttcatgcgtagcgagcgctccctcaacgcgggaacctggtacgaccgtgttgtttgccaagttggcatcagcgatccatacgcttcaatgagttcacctcacctcgagccgcaggatgcacagctctgctttgcctcggccaagcgtgacgcgtccggcgtaaccagctgattactcgagctggacgacatgctgtagttcgtcatggaggctgcaagttgcagcaagactagagctccacagtggatgcagcctgcattgcaggtgcatgacacgaatgagaccaggccacttgtgtgtgccggtgcatcggatctcgagattggcggcccattaatcgcaccttcccatggattatgtatgggccctgtgaggtaagtcaccccagaccaatcacgtgtccatgcaggtgtccttgcgcgcgactggtgtttgtctttgcgtcgcgtgggtgaatccattcattgccgacaccagacaccgatcgccccccgtggtgtcgctaagggatctcctctatgcatgcgcaggtcgcaggtccagtcaaaggcgcgtcgctgttcgtgacatggcattgctatgatagcaatccgcagtttttccccgtcgtttcacgtgacacgcacccatatcgctttccacaggatatcccatatggacgatcccgccccgagccatctactgctatagaacccatagcccgcccatcaggtctcgcaggcatagtccgaaggttgtggattctttttccatcgcgtacgtggtcgacgcctccatctgcattttgcgtttcgcctccccttccgcaccccgcgcctccgccctacctgttctcccctcgtcgagtagagccggccaccatgatgaacggcaacgtcctcgagcccaccaactcgttggtggggcccatgctcaccgacctctaccagatcaccatgtaaggggaggctgtcccccctcagtcagccccacagactgtagtctcaccctacctctatacgtctgctctacctctgttctactctagggtctacgcgtactggaaggtggggcgccacaacgaccacgccgtgttcgacctgttcttccgcaagaaccccttccacggcgagtacacggtgttcgccggcctggaggaggcgctggccatggtcaacacgttcaagttcacgcccagcgacatcgcgtacctgcgcgaggtgctgccccacgccgaggagggattcttcgagtggctggcggcgctcgactgctccagcgtcaaggtctacgccgtcaaggtgggtagagggtagaataacccaaaaggtagagcgagggtatgcgttaccgacactctactttggtgctttataggagggctcgatcgtgttcccccgcatcccgctggtgcgcatcgagggtagtctgggcgtggggcagctgctggagacgccactgctgaacctgctcaacttcgccagcctcatcacgaccaacgccacgcgcttcaagaaggcggcgggccccgacaagaagctgctcgagttcggcctgcgacgcgcgcagggccccgacggcggcctcagcgcctcgcgctactcgtacatggccgggttcgccggcaccagcaacgtgctggccgggaagctgcacaagatccccatcatgggcacgcacgcgcacgcgttcgtgcaggcgcacacgtcgctggaggacgtcaaggtcacgacgctggacggaaagaacttcctggacgtggtgctcaagtaccgcaacgagctcggccacacgcagaccaatgacgtaagtagagcgaggaggccaggcgttgagtttttggtggatattgacacgttttgtggggttttggtattgtagggcgagctggcggcttttatttcgtatgctgtcgccttcccggatgcgttcttggcgctggtggacacttacgacacgctctcggtatgtattggcttgatgatgcgatggatttggtcacaaggagcattcttggctgacatagttggttattgtgattgcagtctggtgtcccgaacttcgtctgtgttgcgctggcgctgcacgagctgggccaccgccccgttggcatccgtctggacagtggcgacctgtcgtacctgtcgaagcgctgccgtgaagcgttcatcgctgccggtgagtgctacaacatcgactacttcaagacgctcaacatcaccgccagtaacgatatcaacgagccggtgctgaactcgctgaacgagcagcgccacgagatcaacgcgtacggcattggcacgcatctggtgacgtgccaggcccagccggcgctcggcatggtgtacaagctcgtggagattaacggcgagccgcgcatcaagctgtctcaggacgtgagcaaggtgacgatccctggccgcaaggaggccttccgtctcatcggcgcgaacggcaagccgctgctggacctgatgacgggcgtcaacgagaaggctccggaggttggcaagaagatgctgtgcaggaatccgttcgacgagctccgacgcgcgtacgtgaccccgtcgcaggtgatcccgctgcacagtctgtactgggatggcccgaacggcggcctcgtgggcgagctgcccactctggaggagcgacgccagtacgtgacggagcagttcgagctcatccgtgaggacgtcgttcggtcgctcaacccgacgccgtacaaggtgtcggtctccaacgagctgtacgagttcattcacgacctgtggatgaaggagtaccccgtgcaagagctggattaagttagttagtcgagcaaatgccctcaaaatgaccgctgcttcgccacggcgcagtctattctcaagttgtagtaagtggctccaaatcagagtagtttgttttacatctatccccactgtttgtacaatggctgaacttatccattgttgtcgcgaagccaaagtgaagtcggcgcctatcatggagtttttcggcacaacattagttcctcatctgatgcatttgaatacatacagcaaacagaagaagtacaacggaatagaaactcaccgagatgcatgagctcgtactgcagtagccccacaatttcgagaaacaacgccccctgaacaaagtgcatggacgactccagcgcaaacgccagttgatataacggagaaaaagcgaacttcttctgcagaaaatggttcagaatgaagagcgtacaaatttccagtgtggcatacacgaacacactcgccagagccgacattgcccacttgcctgcgcccccagggtagtagacgacattcggtagctcctcgagtatcaacttgttcagcgcaaacacaagcgggatcacgcactcgacatactcgaccagagcgagatattcacaatggaacaatagctgcagaccttgagtcaccaactctctcgactcttcgccctgtttagatccaatgtcatttgtgcacgtggacccttcagaccgcagcttcgtttggcttttgctttttgtgatgggggctggcacaatggacgtgtttttcagtactcggagccgtaattggcggtgagctcggcttcgtcttttcctctttcccctcgatatgagacctctcgggccgtatactgcgaatgcgtccaacttgtttagtagttcactttgttcagaggagatgggatgcggcaaacacgcccaaagccgcgtacgcttcaatgacacgatgtcgaaagcagcaggattgcgggtcactgctataattttggtcagtagataggtattggataatgcaccccgaaaacgccccaaatcccaaagtttttcccaaatgatttaagaccatgggaacgttttacttagcgacgggtctgcggggggcctgccccacccccttgtcccttacgctaagttcctcgtctcggccaggcgcggtgtctagaaaaaatatatcgggttgcagcgctcgcgttcgctcgctcgcacagacacgcccccgcctaatcggcgggtgttggcgactagtgaatgcatcgagtgaggctcgcgctcgcgtccactcgccctcgcccatagactatagaccataatcagtcaactccgttttggtacatatttgggatagttttacgagaaagcagtcatacatgtatgcttggccccaaatatgtacctaaatgttacagagacaattcattatttgggacatttggggcgatttgggcacatatttgggatgcattatcagcttccagtagataggtgtcatcggaattgctgatcttgcagtcttgtccagtgtattgagatacttgtcgttctcgaagaagtgccagcagcgtcttggagttgtctctcacttcacgaaactccaacagaacttggcccaaatcaactgcgactaagaacactgaaaggaggatcgagcctgaggaagaaatgcataccgacacgaagagcgcactgaaaaagtcgaccgtcagggcaacaattactggaatatagtcctccagctctcgtgacgcctccatctgttggagaattggaaagtgatttatttacgttagagagctgggagatgagggtcaactaaacgtcaacccttgatcgctatcagtcagatagccaacccttcagctcgagtccaagctggtcactctaacacttccccgccagcgctggacgctagcagcgaggaagtagccccaagcatggatcgaagctcgcgaaatcgtacagttggaagagcctttgtgaggccgtccgccagcatgagattggtcgggcagtattgtagcgtcagctcaccagcattaaccgcatcgcgaatggcgaagaatttgcagtctaccgttttctgggcctccgagttcttcccgttggttagtcgctttatggtcgacttgttatcgatcatggcggggatcgggatcgttcggttcaacttcatgaggcgttgcaccaacatcattgtccacctcgcctcctcaacgccatcatcagcagcgatgtactccgcaatggtcgaagactttgagaccactctttggcgcttagtctgccaggacactgtgcacccaaaaacttggacaactacaccagagattgagcgtcggtcaagctcattgttcgcccagtctgcgtctgtgtagacgcgcacatgaggctcagatggattccttcggtaagtcaggccaatgtccttcgttgtctcgacataacgaaggatgttcttgacggcgttccagtgctccttcgatggatcggatgcgtgggcagcgacttgattcactgcgtaagatatgtcaggccgtgtgactcgagcgaggtagagtagagcccctacggcctgcttgtacggcacgtctcctgctgcttcttcatctgcagtgcgtttgtacaggatggcccccttgtccatgggtgtttttctcggccggcaattttccatcccaaaacgtcttgtgacttcagcggcgaacttggactgattcagcgttgtgatgcccctcgcgtggtcaacgtgaatggagatgccgaaaaaccatttggcttccccgaggtccttgataccgtacttcgtctgcagtgcccccatcaagtgctgcatcacggcttcatctcggtagcctattaacacatcatcgacatagattagtacaatcagctcatgctcaggatgcgtgtatacgcaacagtcttccttggtagggacaagccccattgagaggagaaacgcgttgagctctgcattccactcgcgtccggcttgtttcaagccatacaacgctttcttcagtcgccagactttggaacgaccgccctcctcaaagccacgtggttggcggacgtaaatttcctccttcagtcgtgctttcacgtaggccgtggggacaccgccttgccgcacatgaaggcccaattgggtcaccagggcgagaaatacacggaatgagttcaatcgggcgactggggcatacgtctcgaaataatctttcaggaactcctgcgtgaatccttgcgcacatattcgcgcttttaggcgctcaatagtgccatcttcgttttcttttgctcgaaacgcgatcatagagccaataatattcgcgccaggtggaggatcgacgacggcgaaagtatcgttgtcgcgaagcgcctggatttcttcttgtattgctttctcccactttggccagtgtggcgaagcccgtgccgccgaaatgtttggaggcgcctgaatgatctcatcaagagtagcttcggcagcgctcatagcacgtccggctatccgagcggatcgtcgcagcggagctgccgttgccgtgccgtgctgaacgtcgtactgcaacagcttggatggacattcgctcctcgcccgtctccattaaatggcgagatcgaccctggacaaaattgggagtcggttcatcattactgtccacatcgagatcgtcttcttcgtcgtcactgtcgtcacataccctcattgggtcctccttgccttcgtgcctaggaggttcattggaaggtggctctaagaagaccacgctcctgctgtggacaacttggtgtccacggcctgtggacaacttggtgtccacggcctgtgacgtagacaaagtggcccttgcgttgggagtcatttccgaggtaaacaccggtgcgccctcttggccggaacttgtaggcagtagatcgtttctcatctggaatcaacacgacgcagcgctgtccaaatgctcggactgacttcaggtctggtttcctcccccagaatttttcaaacggtattttgtcggtgtcagactttgagagcacccggttccgggagtatacagcattgcgaacggtatattcccagaggtaatgcggtagctttgactgcacgatcatagctctggcactctcagtgatggttcggtgggtccgttcgattactccgttctggtggtgttcatcaggctccgacatctccgtcgtgatcccctcatcgtcgcataccttcataaactcgtgactgagaaactttcctccattgtcggaacggaacgtcaacacatttggccgcttgtccttaaaccgacagttgaccgcgttcatgtagggccgaaaagaggcggcggcgtcgctcttgtgcttcaggaaatatactgacgtgtgccccatccacttgagagcgagataatagcgattgccgttgtagctacgtttaaagggtcccgctaagtcaccgtggcaaatttcgacttgcgagtacttggatcgggtcgccttgaggggtgcggcagcacggtgaattttgctgagagcacacgcttcacacttcttgcttagggttagtggtccagtgatcttcagtcctttgacggcgtcagacttggacagcttaacaatgtcgccgtagttgaggtgattgagtcgctggtgccagtcctcgattgagttcgggcgcaaggctgctgctgcaacacgcggggggggcttgagagcatatacgccgcgagtggctgtaccttgcatgatcggaggtccgtatacgttgcatgctgactctgtgaactccaccttcatgccactatccattagccgcttgacggagatcagtgtttggctgaatccaggggcataagcgacattttccagcacgacgttgttgagctcgtcgatcatcatcttccccatctgatcacctgtaattagccgtccatcagcgacttctacggcgtgcacctcacagcttcgtagatcgaaaagtctggtgggatctccggtaatgtgataggttgaggcagagtcaattagcggggcaccgcgctgggtaccgagatctggaatatcgtcgggtgtctctttgcgtggctccccccctcttcattcagacgaatcgcatggcatctgctcgggatcgtcggaaatagcatcgtcagcgccagtttcctcgtccaccgttactacggatcggacatgtccgcgctgagctcgggcggcatgggccatcccttgttgcttggcgacgaagcgatcgtgaaaattggttgtatgcccgagttctccgcattctccgcagcgggccttggagaaatcgcgctgtactcggcggtagcgtttggcgtcgttgcttttgtactcctgtttgattccgcgctcatctaacttgcgttttccagtgggtggacgggaggcagaaggcatggctgtcccaaagcggttcaccgtagtaagaacgccttgcatccctccattccgagtagctagttggcgccgctcgcgccggaccattgtagccaccgtaactggtctgcatatttgctcagtggttgcctgtgcggcagatagccaacccttcagctcgagtccaagctggtcactctaacaccaccataaagtgtttggctgcgaacttccacactggcagcacgataaccacaccagtttgatatgcttcgggtaccgattcgtacagtaatttgtacagcgggaagacagctcccaggcttatgtaggctgctagcataggaatatatcttcgaatgtggggacgaaagggcgagtttcttgagaagggctccgtgccgaagacgagcacaaacattacagggataagtattccagccaataaacctccaccctgccagatgaaagggatcggaacccaacgatttgcgttgctgccacacccaagcgttgttccgagcgccacaagcatcctcttcgtgcttgttagactgaaattcggcacaaactggttgaatgcatcggtcccataaaatatcaaactgcataccattaggttaaagcgaatccaaaacatccagttggcagcccatccttcctacagcagtcgtaatggtaaacattccaacagagaggcagcgatcaaaccggggagaggtgtgagaacgcacaccacaataactcgggttcgtgatgtggtgttgcaataatggtgcaggctttccaggcgttcaacggaataggaaccttgccgaccgacttgcatttcgttccatctctcctccagtcgatgccaagcgcttgtactccacagaccttctctcgaaactgaggcttgggtagagattatctcgccatcagacccaagttggacagcaccgatcgatcccgccatcgtaagggatcagcagagccgggcggctgtacgatacagcagcacaataggaagtgaacttttattagccgcttatttatactgcttcagcagagtgccgagtgcattctcatacacaggtaatccacaaaaactacgtcttcgaagcagaatatttgcaatatacttattgacgaagccattcaaactgaaatgtaaaatcaacacctgcagaagagagtagctctacaaacgaactacaagtagaccaatctcaaaaggctgcttaccaaaatgcacgagctcgtactggagcagtacaacgatttcgagaaacaaacttccctgaaccaggtacatttccgtctcgagagcgaacgccagctggtacaaaggcgagaatgcgaacttccgtttcagaaagtagtgcagcaaaaacaacgatccgacctctagcgacgcgaagactaggatgtttcttaatgccgtcactagccccgccaggatagtaaattcaggttgtacgtggcaaatacgagagggacgatgcactccacatattcgactagcgccaagtactcgcagtgaaatagcagctgtagacattgcaacaccatcgctttgcttcgttcaccagacgcgctcgatttcaatttccgtttcacgccttccgcgttccttgacacagcaccttttccagccgtggcatctaccgggataggtacaacagaggcgatttgaacgcgtcgaatatgcagtgaccgccgctcaggtcgtcggcgagatcgacttatcttcctctcaaggtgggaatctatggtactgaagataccgtcttcctcgagtttgtccagtcgtctggcttggctatcagtcataacgtggggaagacaagcgcgtagtcgcgctccgttcaaggatgcaacctgggaaggcgcgaggatctcgagtcacttctagaacttgagccaccagatcacgatcctctgcatgcccagagccttctcttttcagcagttctatcactgccgttgcgttagctcgcacctcgcggaactccagcaatgcctgacccacatctgctgcgatgaatagtgctgaaaggtagagagatccggaggatgaaatgcatacggagacaaagagcgcactgaagaaatccacagtcatcgataccaccacgggaataaaatcctccaattcgcgtgtagcactcatgataaagtgtttcgcaccaaatttccacagggggagaataattagagcaccacctcgataatccactgggacgtactcgtacagcaccttataaagtgggtagactcctgcgagggccatgtacgcaaacaataagcgaagatatcgacttagatatatacgacacggagaagtactcatgaacggcgcaaacccaaagacgagaaacatcatcgacggtaaataaatccccagcaacaagcctccaaattgccaaatgaaaggaaccggaaacccgacgaccccggttgctgtagctactaaccatgtccccacatagctgagacttgctcccagtgaaaccacgatccttttgaggagtgtaatgttgaggttggggacgaataatatcagctccgatatccctacaaacgtcagcgtaaatgtcatcaagcccaatcgaatccagaatacccagttacccgaccacccatccgacggtggacggagtggaagacactccaagagcacagcggttgtcagtgctggtagcggagtgagagtgcacaccattatcacacgcgcacgagaagtggtcttgcagtagtactcaaagctctccaaacgctcgacagattaagccccttgccgtcccgcttgaatttcatcccatttctcctccagtcgatgccagggtgacaaactggaggaacgcgagatagacccgccttcaaccacaccaccgacccagttaccaacaggagcgctcccttctggtctgatcattctgactggtgctggtgttgtgagaacgcagtattggactgcgaattcggtcagcttaactgtaaatagtacccgcagtctcgagtatttttaaatcgcggacatcaaatcggccaccgagattttaacgctctgtcgtcctgtatcatctcacacttctcacgtaagatactactggcagcaggctcacatttgcaatacagaatgaggtttaggcagtcaccggactatgtaaggcttacagcaactagtcctccttgtactcgtcgcccatggcctcctcgatcatgcccttcagctccagtctactctcacaaaatccatcccaaccaacaatcacaccaatcagcaccacaagctctcgaaaacaatattcaaagtccccacccaccggatctccgacacctcgtccccctgcagcacgtccttgacgaactgcgcctccacgcgcatctgcaccatctccagcgcgcctcgcagcacgccacacagcacgttcgagtaccacagcacgccgtacgcactcggcggcagctccacaaactctgtaaaacacaaacagatcagaaagaactcctgaaaatgacccccaagagcctactgcacctgtcaacgggttctcgtagatcaggagactgcaggcgttgccctccgcgttccactgcgagacctccacgttgatgcccaggaacatcttgaacgccaccttggccaccacctcggccgtgtcccggaagtcctggcagctggccacgcccgacttggccaggaactcgtccacgagccgcacgccgatgttgtagcccctgccgacagcagtaccaagtcagacaattgttctcataatgtgtatgcctccagttgtgccacttcccgtacattttgtcgagctgctggttcaccaccttgaggtcttcgaagtccttgatgagctgcgtcaccagcgagccgtacgtgagcgcgaagagctccccgttctgtacaacatacacctacagtcagagaggagacccaggggagggggttaagtacgcagcacgtgcacgcaccactttgggcatcttgctccaggcggcgtcgcccaggcgctggtgcgggcgcggcgtcgacatgctgcgcgaagtaggattgaattgtgtgatgcgtacaccagatgcgaacttaatgttaagtccgacgtttttcgcatttttgacatctagcatacgtgtttagcagaacttcaacttgctgtactgttagtagtattccgatcgatgttggctgcatatccgccgccgaagtgagccagcttgctctgtagtagcgtcacgatctcgaccagcagcttcgcctgtaccaagtacacttgcgtctcaaagacaaatagtgctggttgcgaacaggcgtgttcctattgttccaattgttccaattgttcgctttgatccaattgttcggtgttgttcgggtggttcatattcgcgattaagtacgaaattgcaacttctcgccaagcgcgggatggacaagctctctagttctctatagtgtcgctttggtgcctcttgtaaatggaacactttcggaaaggttacgaacaagttccaaatgttggtatcgttcagaacttgttcgcaaccagcactaaacacaaacgccaactggtacagcggcgagaaggagaacttgcgctgcagaaaccgtatgaacagcacaaacgtcatgagctcgaccagcaagttcgtgactacagttcccagcgccaccagggtagtacacgacattcggcagctgctcgaggatcgacttgtacgcggcgaacacgagcgggacgacgcactcgacgtactcgacaagggcgaggtattcgcagtggaagagcagctgcagtccttgtagcaccagtttcttgggtcgatcggcataccgaaacttgttgctgctcactctggtattcgaactcatctccttcccagtaaactccgaccccggtgggaaggagctcacaacaccgctcgaaacagggacaatagctacgctgcgaagctgtggctctggatgttgcgggtattggttgatccatctactggaaattcggtcgtctatatcgtatgcgtccgacgcctccaatgcctgaagttgctcaagctcttgaggtgacaatggatggggcaagcacgcccgaagacgagcaggccgcaacgatgccacttgaaacgtgcttggataccgagccacgtacaggatcatcgccaccaggtccaagtcttccgagctgttcgtacgtcggttttttttcttctgggatcgggtttgagactcccgtcgacttcgaagaagttgcatcaaaactttagcattcccgcgcacctcgttgaactcgagaagcgactgccccacatcagcaatgatgaacatggccgagaggtagacggagccagaggtggtcatacacgcagacacaaagagtgcgctgaagaaatccaccgtgaacgccaccagctccgggataaagtcttccaggtcgcggatggctttgacgatgaggtgcttggcggcgaatttccacatcggaagcagcaagatgacgatccctcgagctgacaccggcgcgaagtcgaagactacgcggtagaacgggtacactcctccgagtaccaagtaggcgaacagaaaccggtaaaaccgctggagataaggccgcagtggggaggttttcgcgaactccttccgagtgaagaccaaccgaacatcgctgcgatgcacaggcccatgactacgctccccagctgcagcatgtacggaacaggaaacctcatcgcgtttgcccccaggatacacattcccacaaacacagtagttgagcccaccgacacgacaattctcttcacgagtgtaaagttgagacccgggacgtacgtgatcagctgggagacgcctacgaagcttatcgccatcatcgtcagcgtccagcgaatcctgaacaaccagttcgctgaccacccctctgttgggagctttagcggcagacactccagtaatacagcgaacgtaaaagctggtagtggggtgagtacgcacaccaacacgacgcgagttctggaggcagttgtgcagtagtgatccagacttacgaggcgctcgacggagtacgacccacttggagctcctcccatcgctccacagcgcgagtccataagccgattacagaaggtgctcgcacagcgacgttgccgtctgccggcgcggcagctacgcgagcatttgtcattcctgaaagtaaatcggagtgccacacccttacgaacagtgcttctcagccctccgaccaggacgaagaccgttatctgatctcacccgccataatgataacaagaaaatctacaagcttctaaacataaatcttgacatggatatctctcctaaaaacagcccacgtctaatgcaacgcatcacgaagtcttacctcatcccacattccggtgcttagaagaaggcaggaagtcgaccacgagatgacgccttcttgcggagctgccaaatgcgaatccctccgtcagcagacgccgatacaattgtggagccatgcgagctcacagtcagcgccgacacgccctgggcatgcgcttctgggatctccaacacctgctcctggccactgggctcgtccagcttccagaacagcaacttgcccgtagaagttcctcctaccgcgtattctccatccgagtcgaagcacctgcacaccgaaattgttaggggtttggcctttcatcttcacaaccaaaggtagatacgtactggacaggcccatcagcattcacgttgacagtgatcattcttgtaccgtcagtttgataaacggagagctcgttcgccttgctcatgcacgcaagagtcgacgatccgccgcagaatgtcaggccgataatctcggcacgctgcacaggactggcgaacagtttgcgcataagctcgctggtacgcaagtcaatcaggtacacgatccctgtagatattaattgcacgcgtgagtcgttatcagaaaatacaacccaacaaaaacgattgctagctcaaatacgcaccattcttggtagcagcagcgaccgtggagccatcattgctgatgcacagactgaccactgactcttcacactccataaacgtcgacaaaggtgccgtggcgatgcccttgggggtgtagtgccacattttgatggaaccgtcccacgaactcgacagcaagcggtcctcaaacacgcaaatagccgagagaccgtcgtcgtgtgccgtaatctggtcgacaactcggccgacgtccatcgagtacatgtagatgcaattgtcccaagacccaataaacacgtacttctcgtcgggtgatacatcgcagcacgacagagccaagttgcacgacaggttgcgccgcagagttccatctagcgtcgccgagaccttaaaagtggtatcttttgacgtcgagaacaacgctcgaccatccttgcccaacaccagcgacgtcacctcactgcgtgcaaatttacgatgaaattagctcaacaaacaacccaaaagttaagcttcaaagcttgcaacgtacccggcgtgaagcatgtatcgcgccgatggtgaccacgccgacatatcaccgctggtaccaagagtccagttccagcgcttggacgactcgacactcattcgtcgccggagttgcgctgtgagccctcctacaagacgctgcgcttgttttgcaccaaacgagcgcgttcggaaaccaaacatactgcgccgattgcccggtaatgcattcccttcatcaccgttctcatcataagaatcgtcttcacccgccacgctatcctctcgactacggttatcgacctcgttagtcgacgacgatccattcggcaaagactcgtccagcttcggatgcggaggtacaaactcaagtgtagcgatctccaccgctttgccaacatcattccgcgaagggtgggcgccagaaaagagcagcttcggagtctgcccgaactcctgaatctgtgcttcgaatgaacacttctccacagggtcggttatggtctcaagatccaccgagccctcgtacgacagatagtagaacactgtgaaatataacgaatgattgcccagccgtcagtaagccgatcgtctccacagtttcatcagcatggcgggtacgtacgattgttggcctcgattgcagcgtcgcctcgttgtttgcatccgaaaatcaaatcgatccactcatgaagatgctcggacacgtactcactttccagagcctcccgattgagacgaacaaaggcagacggactggatgcccaagcgggcagctcaacgtctccaacctgcaaataatacaagccgcattagacaaccaaatacgttcttggaactacacaagcagacgcacccttgtcaacttctgcgtcgttcctagatccagattcttgccgttgcaaagccactcctccggcggcagtgagtcgtcaaagaatgccgggataagctccttaaggtcagcgtggtttgtgttgcagctactccaggtgctggggatgctctggaagagtcgatccggggcgtcgaacttgccattctgcaaacacagcatgtattccggggccatacgcacgaagtagtagagcacgtatccgggtgtcgagtagtgggttccgtagagaaacggtggcggtaacccctcatcctccatgccgcgtggcatggcttcaaagcgcgctttataaaactccaggcgttcttcgttcagcgctccgataggtttggacaagtcacgataaaccgcagggtccgacaaatcaatagacgggctctcgtagtcgttcaaaatccagggaaacacgggatactgcgtcaggtcgttcttcgtgcgtccggcagcgttgttcaggtacaccaagtagtcgtagttggacacctcgcgctgctgccacttgcgcagcatcgactccagatccgtctgctgcaggtgtctcaagtcgggctggtttaccatcatgtcgtacacttcgtctctgtcatggtggtttcggaagctgaagaagaagctctctccgttcttgagaaagatctccagacccgtttgcttgagcatgtggcggcgcttgtacaggtactcgattgtgttgtacgcccaattcagcacggggtcgcccacgttgttcacttgcgctggctggaagtacagtcgctggttcgtcagcatcatgcagcccgggtacttgagcagcggcacaatgcggtccaccagcttgcccttggtcagcagcggacgttcacggaagtccaccaacagactcgagtcgaactgatccgtctgcctcggtgtcagcacgggctccagcagcgcctcctcgtccaccttgttcatgacgctgtccttgtgcgccagatcccagatcggacgcacgttcttcagaaactcctcgatcttggagtgcagcagagagaaaatgtacttctccggcacggcagctccagcgtcccccgacgtctccttctgcacgtacgggtggtccactcccctctccttcatctccagcaccgacgacaccttgaaggtcaggaaaatggcgcagtctccggcctctgggtggtcgtgcagctcggccacgggcatctccttcatgtcccggaagaaaaacctcagaacgggcacgttgctgtcctgcggctcaaagaagaagccccttgtgcacatcttcagccgcccctgcaccttgctgccgccgcatacacaacaatataaaacatgaatataatttactatactaagtatttaaataaaactagtgttaagtaaaaatgtgtaacttaccggtgcgtgtcgggattgggctcgagatagcgatgcacactgaagtcctgtgcacacaaatacgaatgtacaaccctaatttttagaggctaaatgggacgaattgggagggaggcgcggtctaacatcgaggaagaactcgccgtcctccagcagcagcaggttgaaccgcgtctgcgcgctcttgtggccgaacttggacgcgaacatcacgcggcgaggagcgcaagaggatgatggttcgagtgaaggaaggatgagatgagatgctacgttggcagttggcgcgacacaccacgcgcacattaaataatgcactttgatagtttcccgttattttacaaaaataggcaaaaatgcctgacgagaccccgatcctgactacgttgaagttggcctcgtcaacttgactctcttggcacgccgacctccagccgtgctccacgcaccctcaacgacctcgccgccggggacttcgcctacctgctcatccaaaaaggatcaccgacccatccttgcgatgggcttccagcagctacggaactcgtcggtgggtacaaaccgtcgacaaaggggagaagcgcaagcgctagagagggatctccattgccactttccaaaggactctctcagcgcgcagatgtccgcatcagcaggcagtcccctccagggagacgctgcgtggaggccccacgtcaagcaacgggattccgctctacttgccgcctgccaacatggaatcttggaggccgtcgatttcctcaccgaggccggtgcgcagttcgacgcgcgggacgaagacggtctcacgccgttgatgtgggccacaatcaacgggcacgcctcggcggtgcgtctgctgctggcacgcggtgctgacgccgctgcagtgagcaaaacgggcttcgacgccttgatgtacgcagtgcagggcagtcgcctgctggaggcaaagttgctgctgcagcgcgtggggactttcgtgagttggttcgatcgaccgctctataacgtcgctgatgtcatggctcagcttctgcagagtgggcgggaggacgcagcgcaactcattgtaaagaacagcgccgatatcgacatggcggacgggagcggcatgacgctgttgatggtggccgctcaaatggggctcgcagctttaattgagttcctcgtggggcgtggggcgtccgtgaattatgtcgcccgagacggctgcactccgctgatgcacgcagcttggtatggtcatgttgctgccgcggaggtgcttcttcgccacgacgcggttgtggacaagaggagcgatattgaggcgactgctttccatggggcctgcacgcgcggccacgttgacgtcgcccagactctgctcgactacggtgcagacatcaacggagtggagccaggagggatcgtgctgcgagagagcgagttagtgagatggctcctcgagcacggagcgtcggcgaacaacaagaacaacgatggatggtccgagatgatgactgctgctcaaatcggagatgttgatgccatgcttgttttactggaaagtggcgcgaagatcgtccgacccgattttgctgacagggacgtactgcaagttgcatgcgagtacgggcatctggagattgttcgcgcgttgatacagcacggagccgctgttaacgtggagcaagaacatggagcaagtccgttaatgcgagctgttggtggcggccacacctctgtggtgaggtttctcgtggaaagcggtaccttggtggacttggcgactgacggattgggcactacttcgcttatgaaggctgcggagagggggtccccagagatagttataacattgctggagggtaaggcaaacatcaaccatcggcgccacggcggtgctaccgccctcaatattgcttgcgagcacgggcaccttgaggttgtggtagtgctcgtggataacggagcggggttggagctaaccgacaacgctggcaactcgccgcttatcgccgcggcgcaaatgggtcattctgacgttgtccagttcctgatattgcgaggtgccaatatggatgctcgcttaccgagtggggggacagcattgctgacagcggtttggcacaaacgactgtcggtagttcgcgtgttgctgaactctggtgcggatatcagtttgtgtggagatattcaagcgtggccagcgctcaagccgcttactacagcggataccccgagtttgtgcagctcatctacgaacgcatgcgcgaggatgaaaacaagccagcggccgcccgccagtcgtgctctagcgttcaagtctttccaagcaatcccgccccaagcaagtccgttgatcagaaacatcacagcgacacaagacttcgaattgcgtgggagcagggcgacctcaaaacagttgaagcgtgtttggacaccacgcgcgacgaagtgaacgtaccggacagcagaggtaggacgcctcttgtcagtgcggctcacaaaggccacacgagtatcatcgctctgctactgcaggatggagcaagtatcgaggtgcgaggattcactgccttgcgtgttgcgtgtgatctcagacagcttgacgctgcgagggctctcctcgagcgaggtgcttttgttgattcgaagtgcgacgatggctcgacccccttgatggctgctctgcaactccagtatccccaaatggtggcgctgttgttggaaaagggggccaatgtcaccgattcgtccctgactactgtcagaactcaggaagttgcgtgtcgtactggacggccagatcttctcaagctcctcctgaagcatggggctgcacttgacgcgcaagcctcggacggcaccactgctctgatcaggctcacgttacagggcaacgtcgcagctgcagaaatgctgatcacgtatggtgcatcgatagacttggcagacaatgagggtcggaccgcttggatgcatgccgtacggcatcatctttccgccgtcgtagcactacttgtcgggcatggtgcgagcactgacacgcagtgaccaagtggtggatgcatgaacgttgcgcggtttctcctcgaccgtgtcgcttaccatccccccccctgttttggtgagcaaatgtataatgctagggttactgttgttgcgtttgttttcctgacaacattcgaacagaataatacaagaaaaagcttttccttgcgagtgcaggtcatgggggcaaaaggaagtccattcacatgtttagccgagggctcgtagagtacgcccttcatctctatcctaactagcgttgggaaagcctatccgctcggaaactgcacgttgataggaaaccaaggtacctaaatatacaacatgcagcttggcgaggacgagcttgtgctgaatggtggcttcgcagtcttgatgttgaagctcgagcacttgatctgatgaccttccccctccaggaaaaatcaccttccgcctcgccttcggctcctcggaaactacccagtggagatggtgattatgagcagcgcgtcattagacttagcggacaacaagggctgaactgctttgatgcacactgcctagaaccagtgatggccaaaactgtacgggaaggcattggaggtaaagcgatctgtagcaatatgaattgcagtaccaaggcagccagcaataataactgcaatactggtcgttcttgcaataattactgcaatactataaccatactactctgtcgtcgtagaggtcgccgatagcacatatgccgtcggaactgggttttgagaacattattatgttgacattgacagccttgcctgcttttaagtgaaaagtactagggtttgaagagtttattcggttggcttaagactgcagtaagaattgcaattccgcagcgctccgcaatatgtattgcaatagcttgcaagcttgcagtatggcattgcaataagtattggtaaatgccaatacctgcaatacatttttggccatcactgcctagaaccaccacaccactatggtagcgctgcccctcgagtaaggcgcgaacgttgatgacaagcagcggccaaatgggtaagcagctttctgaaaggatcgcaagaacgaataccgaacgcagtgatgcctctcctcgactaacaaaagtgttgtcgcagactgcaaccacacttttggacgattcagataagttgatgcctcaactcaccataacgaccactcctgttttgttccgatctacccaacagtgtgtgtacatacttctctggcccacataagaaacaacacttcggttttctggacataactatttacaaaaaaatcgtttggtgactcgcaatacctcaaccgaaagctgcgcatttgctccgtttcacgctatgatttaaaaaaatctagcagcagaaagaagagagaaacagccttttatctgaagtccgttttaggcaacattaggttttttagcgaggtgccgtcaaaaattagcgatattagaaaataaaatatcaccgtaatcgcgagtgactgctttacccttatgttcggttgtcgatgttgtagcgcctgttggagacgagttagaagggctacagttttgaggtttttctacgcgattatctcgacatgcgcagacccatttattttggccaatagtaagctgaaacagttgattatacccaatcatatgtgacatgtggtccacatcaaattgaggtttaatgccgaatgttgtttcttaagtgggccagagaagtagagcttactctgactgaaataacacctcaatagtagcccctcgtagtcactatcaagaagtttgtatggaaatagcccgaaccctataaaatgattttcggccggaccaaagcctcgcctactgcgacactaggttaaatccaacggtgtatccttctcgatcgctagagcaaagcctgtcaaagctcgcgattatgaagcaccggtggatttatgtgtgtgtggggggactaactctagtctgccaatatacaaacatggacttatggagatgcaggcttcgtggtacggctttagacgatgatattcattccaaatgactttcggcctccggcaacagtgagctggaaatcatttcagcggctgtccacatcgttgaacccagcgagtttcaagtcctccagctgatcaccgacggtcagaatgtcgttcgatccagcgtaaatgaggtcgacgccaggacgaagatattccgcgcctggtgatacgccgcctggagtgcatccaatgagttggtgccagctcgggttgcatccacggccagaaattcgaatgtaatcgtcccgacaaccacctccacctccacctccatagttgtgaaagggctcgttacacttagctggcggtgcgtgaggcaggggtagactgattttgggcggatttcctcaatcaatgtgcgagctaagttcaggtgttcggcatttttggcgattctctcgacatgtgccgtagggtagccgcctaacaagtcgaaagcggcgcgtccggtctccatgcaaatatcccgcatgtatcgccggtcgcatgatggcagctcttgcacgaacatccgcatcatggtcatgccgcttgactcgggtggcatcgcatcaccttttaaagatgaagcgcaacaagtgtttcctgtccgagtgattcaagtattcgatcttgaggggcgctggcgacgcaattttgcgctatatacgaggcgtacgcacagctactcgaggcgggaagggtggatgcggtccgaaaacttgggagctgcatgccacatacgacctgggcatcacgagcacaacggctcgggctagggttcagcaccaagaatccccagctggacgaggtggtacgcgctcgtcacgtacgcgaaatgcgcttgttgaagcgatgtcattcacgagattgagggcgtcaatcatggactacgaaacgacatccaagcccctgacccgttgaaggtgctgtcgagagctcttctatacagcgcgttgcctcatcaccttgccatacacgccttggagatcatggcgagacccgaataggtgatcgtggactgtgaggagctggaaaggctggacgcggtggactactacgaagagccagagacggaggaggaggaggaagggggtgatcgccaggattgatgagctatggtgcgactagagcggacaacactttaccttcttaaccttaatgcactggcgttattgaattttcacgtacacactttcctcttgtgtcagtatttgtaggacttctcctcatcatcaccgagtattagtaggactcctcctcatgtcgaagtattggtactaaagtgtggcgtgctccgaatccaaaatcgtgagtgattatcgtagaagttacccttcaacttggtgcaaacttaaaagtcgcggtagacggttccagatgacactcaggcaataccacaagagcaagcacgagacttgagcgaacaacactcgcctttttttgtaacctgaatggattcgcgtaatttaatttccacgtaaggtttctcccttgcatccccttatgtcattattcgtatgacaactcctcatcatcaccaactattagtgggacttctcgtcatcacatccttcccagcatgcttcatggatagcgaagctccaccagcactagaagtacctagtccacatgccctttcttcggacccagttgctggaaattagtacatagctagctgaatcacgcagcgagcaatgaaaaaaaaaaaaaacggcacggcattcaccggtagatcaacaagaatggataccatcaaaacgctaattaaaaccaaagcctcggtcgctaagagacagtcagctcgtggatgccctgcaagtctgatacatcgatccatgtaggccgttcagctcgaatcgactgtggtcatcgagcacaaaagttttgaactcgccgtcatcacttaccaattctagcacaataatgtggtcgctgcaaaatcgagccagaaacagccccggactaagaactaaagacgtgatgatggtgtgtggatgtgagggggggggggttggatacgaagtataagaagttggagtaagtttgggtcggagtgactccatccgtcaactttggatgtaaaacccagagaatttacattttccgttttacaaattacggctcttaagatgatggttttatgtggaatacttaatcaattaatagcacgatataagtaaccaattttctaagtattttatgctgaaattagggtacttttcttgttccaagatgattctctttcgcgcaggccgagggtcaaacgatgttttaggtgcatgagggccgtatgcggtgctttagccgaatttaagccacttaagccgtgtgagggatttctgtgattcgtgcaactagggcgacatagcctacgccgtaggagggacctgcaaggcctccgatgtgcccacgtagaagatgtaagcggggtgttttagtagtataatactgcacaagtttcgttggcggctacaaggcgcaggggttcattaccagcgttgcgtcaatttacattgaaaaattgattgagattttccgtcacgctacaattttaattgttcaatgtcgacattattgtgtactcttgtgatttgtataggaatatgtatcgaccatttgattggctatatatctacatacagttatcaagtcagatgatgcatatccggcaaaaaaatcattgcagccaattttctaattgtaatagttgaccacaatttttccaatgtgtttattgcatttttattgacgcaacgctggtcatgacttgcggtggcgcagggatcgagttgaccgaatgcgagcgagcgttggcgtggtctactacacggactacgaaagaacaagcagctgccacttgaacgtgtgccagcgcgcggcttgatgcggcctgagatcgtccgaatatggcattgttatttagtacgctatgtggggctggataaattatcccatgacgctcctgtcaacacaacagtaaactatggggcgcctcatcttaaacaataattttttaccctcatcttaaacaataaataactccattatggaaaggatgtagttaattaacaactcacacactagcttaccaactagcgcaaattgtcaacagtcgttgcgtcccagtacgaccgatcctgacgcaggaacaaaagtgtctcaagcgtgtgcggcagcagaccctgtcgttgatgaccaaaggtcacccgagcaatgctaaagaagcgttccaccacgtttgacgtggatggaatgctctccagctgctcatacttcatcgcatcctgcgcaagccgccggcgcttccgcaggcgccccacaaacgacgcggttgcctcctcctcctcgctcgcggccgcgtcgtccggattggcagcttcgaagagtcgcaaagcggccttttcagcacgcgtcagtcgctgcgccttcccgcggagaatgcgagcacacccagtctcaaagtctgggctgtgcacaatgttggctcgaggtcctgcaaaataaaaacattatacacatgttagtgaaaataatacacaaattccataattataaacttaccaatgtagcacccatactgtggcttgacagcaatcagctcgtcgaaccactcgcgcacgtccagcgggtcgacgtcgtggccttgaagggctttagagaccgactcgatgtcgcacagctgctggtacaatgcgcgcagtcgcttgttcgtcgccggcggcggcagcaggtccatgatgccgccgtcttcggcatcaaggaactcgaggaactcgaggagcttgaggtagcgccgtaccatctcgaacgtggagcttcagcgtatgtcctggtaaatgacttttcagcctcttttcagcctattttgcaaaattacaaaaggacacaaattgtgttagaaaaatattgatacaccacacatacacaatgacgcttaccgtagtttcgcagattgggttagagtacgcagctttaccatgagtgcctacacagctgccaggtcctcctcgtgcgatgccatgtccgcctgaacaacaaggttcatgcggtggcttgcgcaaccggggcggatagcgcgaaccatgaggtctggtggctttagaggtgaaaattgataactgactgcggtggagtgagcagcgacttgcaacacagacagcaagtgattccagcgctcctaaatgacaggaagcaagtagatggctggttaaccgcaaacattattatataatggtaactgtcataaattatgtaatatcacaaatcacagaaatcaattatcacagtagatggtcgaatgcgaaatttattgttattttctgaaataatgttattgacaatactattttccgagcaggagtccaagcgggtgttcgccccacttcttggcatttacgtcacggccgccaccaaagcgcacaaaaagacccgagctgctctagaaccttacggagcgtacgaagccccagtgtatcgacacgctaccaggactgataagcactacatcttctcggtgccgctcgcttccagagaccaccgcccgttgcattggatgctgcgtggcgtcgctttggtctgctccacggatcagtagtagtaaaaggtaaatacctatatggtatgctgatggtttggttgaaactttcaacctgaagggatcactgaaagaccgaaaggcacaaacaacagttggtattcattcaaaagctcgtcagcaatattggacgagatgttacgtcactcaaactgcgcgcgtggtcttctccttctccaatttgtcaactgccagcgcaaaaaggcagccaaaacttaccaccgtggagcgctggaggatttaccagtgtccgtagcggtagcggtagtagccatagttcgggtagccaccgtagccgtagttcgggtagccgtagccgtagttcgggtagccgtagccgtagtgcgggtacccatagccgtagcggtagcctccaccgtagaagtcctccttgtcgttgggtgccgcgccttcgggagcttgcgccggcgcagcctcggggtggacggcggggtcgttctcggccgctgcagtggcgagcgcgagcaccgaggccagcgcagcgacgatggcgaaggtcttcatgtcgatggaggtctacttgcttgcaggagcttcacttgtctgtgttgacttagcttgcgtgcgagacgtccaattgccgaatgagcccaaggctggctggaggcgggggcatttctgggacaggcagggtggcgcaatgaaatatcaaaagcatcatgccgttagaaccttttctccttggaaagctctgaccttgctgttcaacctggcgccaccaccgttagtcttacgagctctctcactattcactcaaccgccctcctctcaagccaccctccgacccggaagcacactcctgcaatgaagaccaccttcgctctcgtcgctgcgctggtctacgtggctgcggaggcacccgtcgtcaataacgttgctgcaagttctctctcacttcaacttgcctttttgctcatcatggctatattcgtacttagtggacgctctgattattccgcgtggtcgttcttgtaaaggttgggtacaccagcggctccgccgatatcacgcgtgtcagtccccacatctcaagatcgaagcgagtctctcgtggcgaatgcgggcggcggtttggctcctggcgacggcttcggcctcgggcgcgctggcgtccggccctaagttccattatggcttcagcgactgcgtggacgacgagcgcacgctcttctactacctcaaagaggagggcacgtgtttagcaaacaccacgaaccaggtgctcgcgaaacgtaagcacaagaagaacccactgtctgtgtgtgttttattccagtctgggtgactgacatggatacactcgtcgtggtcttatgggtgaattggcattgtagctccagtccacggtctccgctgtgacgtccagtgcgataaaggctactaccttggagccaagtacgtgccctctcatcatggctacatccgtttccctactgctatgactgacttgtgtttaactatgctgcagtttctccggtccagtgcctgtatcaggctgcgagcgctgtccacagggcaaatactcgctgggaggcggcaaactcttctcgcagcgcaccaatgcatggagttccccactctccgccgagttgcagaccgactgcatgacccagaacatgtacacgggccactggcagcacaactgcaacccgtgggtcgcgtccgccgacgggtcctacatctcgtcgggcgagaactcgggcgtgatgcagaacttcgaaggcacgagactttactccacgctgcgggtcagcgccatgtttgtacgggacgggtccgtcacgtacaagtaccgggtggacgccgagcagccctacgacggcctgatgttccagatcgacgacgacgaaggcgccaagctcgtgtcgcagtcggacggctggaaggaggccgtggtccaagtgtcggccggtgcgcacacgctggcgtggaactacatgaaggactacgcgggcgacgcgggcgaggacaagtcctacctgaaggtgatcgagctggtgggcacggcctggtccgacctgcactgccacacttgcggcggagatatgaccaatagtggcggatcgctctgcgccttctgtgggcccaacgagtacgccgctgccaagtcgaacagcgagctcgacttcacgtgctactcgtgtccgcccaacacgtacgcgcccaagggctccattggcatctcgtcgtgtgtggagcagcgcgcgtgctccatggacgacgtcgaggagacgtacactgcctgcaagggcggcgcgcgcgatgtcacgtacgcgtggagtgagccgcagacgtgtgacacgacgctggaggacagcatcaagcttcctgccccgcagaagggcgtggagtgtgcgagctgcgcgcgcgggtatgagttgacggaaggggacgggtgtgaagcttgtgggacgggtcaagcgttgagtgcctcgggtacttgtgaagcttgtcccgctggaacggtggtcgtgaacgcactggagtatggcgtggggacgcccgatgcgtggagtcactggccgcagatttttgacgcggagggagcagagcacgctggctggaagctgacgaagactggacttttgtttgcccagcacaccagcaacgaccaagagactgtcgcctggagtcgacccagtcgctcaccgcttacattcaacgtgccgttcgtgcactcaggcttcgttaacatcacctacaagttgagcaacatccccacgttcgaaaacgacggcgctcgtgcgtgggttgagctggagattcgtgatgcgagcgatagcgacaagaagactaagaaggcgccggagatttcaagctcaccgagcagcagcgacggcgacgacgatagcagtgcggctggcgaggacaaaagcatcgttcacctgctccatggcggggagaacggcacgttcagcgagctcgtgactatcaacgttacaaccgccaccgtgaaggagtttactttcgttgtgcgcgcgactagtatcgaggccaagcgtgccattgaagccaaactggtgtatgttggatttatgggcacgcaagaaggtgccggcgttagctgcgatagctgccctgcagggtacgaacccgttaccccggacgatgacacgcagatgtacggctgccgcatttgtcctgctggctcgttcgctgaggctggggactcgactggagttgtggcatgtggactatgcccagctaacacgtactcgaaggagggcgctgcggagtgtaccccctgtggtgaaaacacatacagcagccccggtgctgtggcttgtgcagctcctcaggcgcttacgctcaatgctagtgcatcatcggacttagtgacactgtcgtcgtcttcgtcgtcgtcgactgcctcggtgacgtctgcgcttagtgggctgcaagtaacatacaacctgtcgctattggaggcgcttgtgtggggcaacgagagctggatactggacgacacggtgtatggcaactcgacgagcctgcagtccacgaagcccgtggagtcgtcgctggccttccaagccgacaagcagaactactggttttcaggtctcttccgtcctcttgggagtagctggatgcagcaggtgccagggcaggtcgtggaccaggaagtggacaccaccacggagattgcttacgtggtctttgccagcatgatgaacccgcgcgaagctggcaactacttccagcagaacagtggcgtgtacggcaacgtcatgtgctcagctccagcggtaggtttttgtgttatcttgcaagtaatgcgctcgtcacttatctcttctccatctgtggttcttgtgtagcaatggagccttgttaacggcggtagtcacatggatatcttaccgctggagtccggtgctggtgtgaaggtttccttcaccaatggctcgccctgtgtcaatggcaagacatactccgccacgttcaacttcgaatgcgacctcaacagcggtaagggaacggtatattgtttggtttcgccagctcggacctaattactgcctcgtacttcatgcaggaaccacgagcaaacccgcgtcagcgtcgcaagacgacgataaatgcaactgggacatcgtctggaagactgcgtacgcctgccccgtgtgcgatgatgactacttcaacgaacttcggtcgacttgcaatggcggcgagcagttggtttcctacgcgcgcaagctggcgtgttacggcggctctgaatctgtgagcaccgagtccatctcgacctgcacggagagcgccgtggttctcgacacgaaggcgctttactcggtctacgtggcgattgtcgtgattggatttgtggttctgcttctgatgatggctatactcattatccaccgcaagtaccgcaacgcatacaacgactacatgtacctgaagggcaaactgccgacggaggagaagacgcaggaggacggatcgaaggagacgacgttcgagtttacccccaggtccaacgctctgcacagctctccgttgggcgccacttcacccgcgcaagaggaaaaggtccccgacgttgttgatgccagcgacgccaccgacgacgatggaatcgagctcaagctccacagcgtgcagagcgtgtagaggggatcatactttcgtgttcttgttaaatggagaagtcatttttcacgataattcctggatttcgacctctggtgagtttgtgtgccggagatttcgactctaatctttatatttgtatttcttcgtgttttcttggatttgttcttcacgtagcagcaaacggcaacactccgacacgacattgttcaattgggctccaacctcccaagtcgaccaccaccactactcaaccaagctaccatgaagatcgctgcgattgctgctgcacttgcctgcttcgcgtcgttcgtgactgcggctgacgagcacgccatcatggacgttggcatgacctctgatcaagccatggcccccggtctccgtggtacgtcggtcgtcgttcctgccggggtcatcaccaactcgatcgacgccaagaacaacaacgtgttcgtgaccaagagcaacatcgtcctgtccaagagcgaccgcgtgcagctcgccaaggtcatcaaggagacgctggcaactcacccggaggcggacccggctgctgcgaacctgatcctcgagcaactcgagcccgacaacgacaacaacaaccgcggaacggcggggaacgtcgcgacgaacccggcggtggtctccaacgtggtgagtagcatcttatcggctatgacccgcaaccccgctgcggccaccggtcacgcggttggtgctattgcggcagcagccccggtgataatggcgcctactactggtagtactcctgtcaactacccgacgcgctacattcccccgatgacggggacaactactccgtacaatgccgcgggcatcgggggcttgccagctggtattagtgctccggcgtccccgaacatgggagcttattctccgtctatgaccggtggcatcgggggcttgccggctggaattggtgctcctgcgtccccgtcgtcgtaagtccaacaagcaccagaagtacaggccgaagtattgcgcttgccttaatcatctcaatcgaatcgatctcattttgcgtgagctctgaataacgacgctctcctgtcagggccaactcaaagcgttcgattcgcattcgtggttgttgttgttgtagacagtaaagcacattcacaggaaggcattttgttctaatccagcgatcgaggcaccaaaccttttgaactttcatttcccagaaactattgtagtgaatccgagatgtgcgtagtgagcgcagaccgttccttgttcgtggggttctgacgcacttgaacctgacactaaggatttatcctcggtacttcggacttttctgttttcctcaatcccgttaggtcctgagactagccgcaatgagtgaggctcaatcctctctcattgttcatttggactccaagcactcaagccgaccgccactgccccgacttccagcttctcaccccaacgaccaccatgaagatgtccattgttgcgatcgctctggccctcgtctacttcgtgtcgttcgtctttgcggccaaccaaccaccggcggtgcccaccccggccgagcgcatgcagctcgccaagaagatcaaggagatggtggagagcaacccaggcgcagtggatccgtcgttcgccgccttgtcgacggaggacctcttcagtatgctttcgggcctcatctcgaacccgtcggtgatctcgaatgtcgggggtcttatcaaggcggcgaccagcggcgacatcggtggagtggctacttctgcgacgggactgctcggtgcggcacttcctgctgcggtatcggctttcgcccctgcggccccggccgccgcggttcccatggctgctgcgcccgcgtcgtaggagtccaccaaactactgcgttgacgacaatggggtcgggtcgtctatccgtctcgtcactttcttcaacctctggcacaacgcagagatccacgaagtatccggttgaaggctacggagttgagtctcgcaccgtgcatttctaatcgtttcaaacaatcaaagtgttcgtttgaccttgggtcaccttaaaactttctgcgcctaaattgcatgttgtgtcttgacgccgatgctgcgaccattggaatcccatagttgtggcttggcggcggcacttattcttggatttggctttggcggtggcacttctttgcttgcagtagtcgatattactgacgacgatcgaggcgcttgatgttgaaaaccgtgcaatacttgctgccgctttttcatccagtcgcacaggatagtcatatcatcgtacgcattctgggtaatacatagtgtgtcgccgtcgttgacgtgttcaagactcgaaactcgctggagtcgcttcagacgatgtcttttgctgcgatgaaggctagaggcattttctggtaggatgagttcggtcacttcacggtaaatactaacgacttcgtggattccaaaccttgctcgcacgcgctgttcaagttttgcgagtgagctaaatgtgatgaaggtagttccaagacgacggagaccgtagaggtagacggaacaaaggtaacgcgggtcgaactcacttggtgggactgaggtaggcttgaactgatccagatatgttgcttgcttgtcagatttaggttttccagattttgatgagcggtgatgtggggctccaatccctcctcgtaggcgggccgactcgacgagacgctgagcctcttggatctgctgtaccctccgtctggcaaatttttgacgcgtaatgtgctgctggaagcttgtactttggaattttgaccaagtgactcgagccccggcagcgcgttcttcctttgcgcctgcacgcaactgacgagtgtaatccaaaatcgcttgctttccactgctacctcgccgctgcttacgaagcgctagtctttgcacatgctgcgctacagccttcttcgtccgcttgctgaaaacctctgctgggcaagacgaaagctcggtattatcgtctgtggttttcgcttcaatgtcatcgctgccagcaacagatgtgaaatccaccgatttcttctgcttgggcactgcaccatctataaggcttggaccagtgtcgccgaggcacgataaaaaatcgttcagctcatccgcaaattgatcaagttcacgcgcaagctcttcatgctggtgctcctccggctcttgatcaagacaaacgattttcgcagcatcatcctcatttgacacctcaaaggcttcatcatcgacatcttccaggctatatatcatgaacattgacatggtttagaacggatgcctcttatactcccacaactactgtcttacctaaagtctccagcctcaaggcaggcaagcaaagtcgcacattccctcgccatttcctctaacgaagctagcgtgtcgttcccagcgtcgattccatcgctggactcttcatcttcagtctcctctcgctgctgccgctccaagccgccacacaatgcccctaactctctcgtatagttctctaaaacatccacgaggtcgccttcgtcactcgaacactcatcatccgaggaagaccagccttcaaagaccttggcaggcattatactacccgacttggggggatctgtcggttgtcgttgacctaaataaaacactaaaaacccaacatgtcctcccataatagatatcgaaacgacaccctgtcagaacccatacttgaagttgtcttatgtaatttacaccaagttgaagtggtatacttttttgcgatccaaacctgcgcctcctcaagctcacttcgactccagccgcacaaacctcgagccaggaagaagatcttatcgtatattccagcaagcgaatggacccggacgtgggcgacgccaggcgcagctacctggctggcctgctgcgcggcctctgggcgcctcgcaacacgcgtctgagtgaggacaaagcctctcagcaggcactcacgcagttcctcgacgaggtccagtgcaacgtgctacacgcgcgcctcgccagcggcagcgaggagatccgtttgaccaactcgttggacggtgaggagggcgggaacaacgacgagaccgcggccttcctcaagctgcagaaggccgtgcccctcacgccggacaacatgagcacgagcgtgcagctcacgtcggcgctgcagacgccattgcagagtctctaccagactgtgcaccaagtgtacgcgccactgctattacgtgacggtgcacgggcagctcagctgtcgcagaagctcaaggacgtgctactggagctggatgcaggactggctgggacagttttgatccagggaggaagcaacgactcaaagcaggctaaggcattgacgagtgatggaggagacgacggacttatgagcattgctactgtgagtgatgaatttgcctactgggaagccatgcagacggacgggaggcaagcgagacgagcgaagaagttcagcgcagcctttgatacggtgcaccagcggttcactgatccgctggggaatctcagcttcgacgagatgaacgacttgctggatgacgcctcaaatgtagcagacgatctgtggcgtctcgaccttgcgcgggatcaggtgtacccgcagagaagaatggatcacctgcttggtcttgtcacgggcgccatcaacgccttcgtcctggctaaagccaaggcgctgaatggagcggagaaagaggctgaggctaatgtctggcaagcgcggttccacgccgtccaccaactgctgcagcaaggagtggctctgtgcgacaagtggcggaacagcatcgagtccctgacgggaactctgtggccggcgcacagcgaacatgcttgggagggacatgtgtctcctcaagctcagcgtgtgcagctgctaagtgctcgacttgatcaagtcttgcgtgtccgcacaacgtatgaagagctccatgctctgttgccgtctcgaggagggaagaaccaagaggacgagctggccgagtcctgcttcaagccattcgaacgactccgcccgctgtactacaatgcatacaccgagccagcttggcagcgtgcactcagcgagtttgatcgctcccttgccccaatggagacgcaagtcgcagtcgtgctacgtgaacgccttcgagccgtcacttcaaaacccagtgcagccgcgcgcttactgcagcggtaccagcatctcctccagcgtcctacactgactcaagcgctcactggtgagcgcgacgcactactcgctcaattgttggcgcatgttgatcaactggacagcgacttcgagactcgaaagcagaatcttggctctagcagcgccggagcgagagagaagaagagcggcatgcacgtcggcaagacgttgagcagcgacgtcaacgtcattgtctgggctcacgcactaggtcgacgagtggccgacatgcagcggctagcacgcggtgttttggccgacttgcctgccctcccgcggctatcgcagcagtgtgacaagctagcggctaaggcgagcgggctcgtgctcgatcgtgttcgcgactggcaggattccatgctgcgcgcgctggatgaagacgacgagaacaacggaggccagtcgcttcgactgcgtggacgactgatgcagatcgacaagcaaagtggcgaccttgtcgtgaacttcagtgagttcctagtcacgctgctgcgcgatgtccgccagctcacggagctctcgtcccagcagactgcagctcaagctggcgacgcgtgggtgcccactcgagtgcgtcaagtggccgaagaagcggagaagtactaccgcttcggcgtgacgctgcaaaaggtggccaacttctacaacagcattgaggcgcagatcatcgacgagcagaagcccatgctactcgactctctcctcgccttcgaagacgccgtacagcggccaggcatcgcgcagaaccagaaccagaaaaccaagagcaaggatgtgacgtgggccaacttggacgagtgcgacgagtacgtgaaccagcttcagactgcggcggatcgactggcggcggagaatcggcgcttcaagcgcgctcacgagaagttaggcgaagatctcttggctctgctggacatcgacttactgcgtcaccctgccaagtggaaggaacgctgggacgagatcaagcgcggtgcccaactggccacgcggaagcaagactcgtcacgcacggccaagtggttcttgtactgggatcaccagctctacaaggtgctcgagtccggctaccagctcggactcgagaccctcaatgaaaacctcccggagattaaggagatcaaaacggagctgcacttccccactgcgtcagctgcattagcttcggcagcctctggaggaactacactcgtgttgaagcctcctatcgaggagctacgcacgacgtactacaaggccatgaaaaagttcgtcgctagacccacaaagtttggaggttttgcgaacgcgcaagtgtttgcagcgatgtgtgacgccaatgcgcgcaacctcgtgcgagtctacgaagcctgtgagaggctattcacacgggtagaagggttgatgttcgagtatgagcactggggcttcctcgcgcgacttggaggcggtgggaatgtcgacctcgacgcagtcatggaggcgacactgcaagaaccagccgactgggagctcaactttaaaacgatccgcactaaacgcaaggagagcgagaagattccggacttcgtcaaagtcgactgcatcaacgtgtcgttggtaccatttaaacgcacgctagacgagcacttgcagcgatttacggacgcattgctgctgtccttacgcaagagcacgttgagccacattcgaattgtggaagacttcgtggaggcgtccatggagagcttgaacaagcggccccactcgatcgacgagatcagcgctgcccagttggagtggaaggacatcgatgcacgcaaaggtgacgctcactcgcactttcagaaggctgagaagaagaagatcctactgcttgcggtgcttggtggaggcagcagcgcaggaatgagtggagcgacgatggacacgagtgaggtggaggatcgcttaacgcagctccccacgcgctgggagaactttgagatcgctctagaagctttcaacgacatgattgaggagcagcgtgaaagtctcaagggcgagatcgaagcgcaagtcgtggagtgcaacgtcgagatcgacaagttccgccagcggtggacggcactccgccctgtggaagtttcttcctgggaggacgacgcacttgccaaggtttattcagccatgactgagtggcgtgagaagatggacgagctcaagacacgcagcgtgacgttgacgtccaactgcgctgcgttttcaatgactgaaccggtttttgacggtcttgccgctctcgacgacgatgtcagcaagcttcagcgcaactgggacacctaccgtcagttccgagaagacgtccaagcgattgcgactcaagactggtttgctttctgcaccaacatgttcgctctaccggatacggctcaaaagtgggcggatgcggtgaaggagcaggcagctcacagtgccgagcggactgtcgtggtggacaagatcaacgacttcaacacaaacgtgaagcgcgcaatgccaacgctcaaactttgtcgcggtgaaccgttcaaggacgatcactggacgcagctcttccggaagcttgggttccctcgtggcgtggagaagcacaaccttactgtccagcatttcatggacgtgtttccagtgctggagctaccagccacgctacagttcgtcaaggtgctccatgctcgagcccaaggtgaagttacgattcgagacgcattacaggaactccgcgcttggacggagacagcagagctcgcgttgttggcgcatgaacacgacggacgtcgcgtggcgatcatcaaggactggaaggacttgacgctcgcgttaggcgacaaccagtcgctgctggcgtcgctgaaggagtcgcagttcttcaagccgttcgaggtcgaggccagccagtacgagatcaagatggccacgctcgaccaggtgctcacgcagctcaacctcatccagcgcaagtgggtcttcctcgagcccatcttctcgaaaggagcgctgccttcagagcagagtcgtttccgtcgggttgatgaggagttcacggacatcatggggtcggtagaacgagaccccaagctgttcaacctggcggatgagttgctcttccctcagctggtagagcgactcaccacaatggtagatcaactcgatcgctgtcaaaaggcgctggcagacttcctcgaggagaagcgctcgcgcatgccgcggttctacttcatcggagacgaagatctacttgagattttgggccaagctcaaaaccccgccgtgatccagagccacctgaaaaagctctaccaaggcgtgtacagagtggagttttccgagcagcaagaccagatcgtagccatgttaagtgcagcgggtgaacgagtggagctccacacgccagtggcagtcaccagcaacgtggaggaatggctcgaaaccttcaccaacgagatgcgacgtacgatccgcgcgcttactgcgcagtgtgtgagcgctagcgctccggactaccacgcgtttccatcccaggtgctgtgtctgaccgagcagatccgattctgctcacaagctgaacaagccatcaagagtgggggagttcaggagctcaagcgcagcttgcaagacacactgagagagctgacgtcgttggatctgagcacagagctgctgatgagtctcaaggtgaaggcgctggtgctggacctggttcaccatatcgacgtctgcgatcagctcttggccgccaattgtcggtctgtcactgactggatctggcagaagcagctccgcttctacttggatactcgcaagcagtcgggcaaagaccccccgccgtgtttgatccgcatgaacgacgccgagtttgcctacacgtacgagtaccagggcaacgctcccaagttggtgcacactccgctgacggacaagtgttacctgacacttactcaaggtatgcacatgggcttcggaggcaacccgtacgggcctgcaggtactggcaaaacggagtcggtgaaggctttgggcggacaatttggacgccaagtactagtgtttaactgcgatgaaggtatcgacttccagtccatgggtcgaatcttcatcggactcgttaaatgtggcgcctggggctgcttcgacgagttcaatcggctgaaggaagaccagctttcggctatttcccagcagattcaggtgattcaagacgccatcaaggagaagacgggcactatcagcctcctgaaccgctctgttgatgtcgacttcaacgctggcatcttcgtgacgctcaaccccgccggaaagggctacggtggacgatctaagctaccagacaacctcaaggcgctgttccgtcctgtggctatgggtcggccagacaacaatctcatcgctgaggttattctctactctgaaggattcagcgaggccaaggacatcgcatcgaaggttgtgtcgctttactccctctctggtcaactgctgtctcgacagcagcactacgactgggggttgcgtgcactgaaagctgtactcaacacggctggaaaactgctacaagcggagaagaaggagcgagctaccagtgggaaggcgaacggtaacggagaggaagaagccaaggcagtagacagtaaaccggtgcgaatgacgacggcggaggagaccgagatcctaatcaaggctgtgcgtatcaacacgctgtcaaagctcacttttgtggactctacccggttcctagcgttgatcggagacgtcttccctggtgtcgagtcggctgatctagcgggtggagccttgggcgacgctattcgtgaggtcatgacgagcaaaccattcttcttggaggtggacgagctgcagatcaggaagatgctgcagcttaaggagtcactcgaccagcgcatgggctgcgtggttgtgggtccttccggtagtggcaagtccacggtgtggcaggtgctgcagcaagcgttgatccggtgcggccagctcgtcaagactcacgtcatgaaccctaagtccatgccgcgcgagaggttgctgggccacatggacctggacacgcgtgagtgggaagatggcgtactcactgctgcagctcgtcaagtggtcaaagagcctgagaacgttcgctcctggattatctgtgacggtgacgtcgacccggagtggatcgagtcgctgaactccgtgctggacgacaaccacctactcactctgcccaacggcgagcgtatcaacttcggaccgaacgtcaacttcgtcttcgagacgcatgacttgaggttcgcctcacccgctaccatctctcgaatgggaatgatcttcctctcggacgaggacatggtcatccagagacttgtgagtaagtggcttctcactctcccccctgcagccgatgcaggcaccagcaacacacgtgacccgttacgacagtggatcgacgagctgttcacgcgcggcttggaggagctgcataagtacgatgtcattgtggcgacgaccaccgttggtacgatcatgaatggcttgagtcacgtagcgacggcgacgacccggtccgagttcgtctgtgctatgatccgaggactgggagccaacctggccatgggatctcgcgcatcttttgccaagtcgctcttcatgatggccaacgagcgtccgccggacatgagcgccccgcttgactgctactgccaaggttctaccttctacacgtacgagactaagcgtgatacctacggcgctatggacggcaagatggatcgtaaagaccttgtggccaacggaatggacgccgtcgtgccgaccgtgagcgtgcagcgaggactgaagctcattgagccgtgggtggagaagatggagccgtttatcctcgtcggaccggaaggaagcggcaagaacatgctcatccgccaagcgttcaagaacctcaagagcgtcaccgtgtcagtccttcactgcaacgcgcaaacaaccgccgatcatgtcattcataagattgcgcagtgttgttcgctgttttcgacgccaacggggcgagtctaccgacctcgagacgccgagcgacttgtgctttacctcaaggacatcaacctgcctaagccggaccagtacgatacgtgtatgttgatcgccttcctgcagcagttgagcacgttcaacggcttctacgaccagcacttggagttcctcggagtcgagaagatccaactcgttgcctccatgaacgcagcgacgacagtggggcgccaccctctctccacgcgtttcactgccatcgtcaaggtagcgtacatggactacccgtcgacggacgagctcgcggtagtgtactctaccttcttggagggcgtcttcgactcctccagtactccaaacctcccagctacgtggaaagaccccgcgaaccgcgatcgactggctaagagcatggtcgaagtgtacgacacggtgaagaccaagttcacggtcgacgagcagcgccactacctcttcacacctcgagatctaaccaagtgggtcttcgccctggtgcgatacgacctcgagcacgaagatgtactagacgcactagcacacgaggcacgtcggctcttccgagatcgcctggtggacaacgaggccagatccaagtttgatggcatcctcaatactgtctggaagcagcaatggcgtcacgctatcaagctgcaggacgtttacttcagctcattacactgtcggacagctggggctacggcgggtggagacgccgccggaaccggcaacgctgcagcagccaccgcagcgtccttacagcgtatagcaagtgacgagttctcccaagttgtttcgcaggggatggtcctctacgagcgtgaggagaaggacctgcacatgctgctgttcgacgagatcctcgagcacttgaccatcatcgagcgcgtgatgtccgaacctgggggctcaatgttgctggtcgggaactccggcgtcgggcgccgatcggccacgacgctcatctcgtacatgctcaactacacaatgttctctccgagcatcactcggaactacgacgccagtagctttcgcactgatctcaagagtttgctggtgaaggctggtgtagaaggacagcactacgtgctctacctggaggaccaccacttcactcaagacgctatcctggagctcaccaactccttgctaagttccggtgaggttccaggcttgtacacacacgaggagatcgagccacagatcgcaccattgaaggagctcttgctggaaagtattggagctagtgggcaggagcatatccgaacagtgtacgacttctttgtgtctcgggttcggcagttcgtgcacgttgtgctggcgatggattcgcgcaaccctcagttcgtactgcgctgcgagagcaacccagcgctctacactcgctgcgctatcgtctggatgggggaatggaacacgagcagtatggctcgcctgccggagcttttgctgaacgggtccgagctcgtcgacagtctcatcaagaccacgccactgattacgagcttgtacgcgagttgcaaggagtttggcgccactccgcgcgagttcatctgcttcctcggtacgtggcgaactctgtttgaagccaagtgcaagcagattgtgcaggagatccgtcacctcaagagcggtctgagtaagctggaagaggccagtgtgacggtagacgagctcagtcgcaacgccgtcttgaagaagaaggacctgagtgccgcgcaagtctcggccgacgaggctatgaaggaaatcacgaacgccctggactctgctgctgacaaccgacgcgaagtcgagaagctcaaggagcagctcgccaaggccgagatcgccacgaacgcgcgtaagcacgagatcgagcaggagctgagcgaaatcacgcccattcttcggactgcgatggaggccgtgggcaacatcaagagcgacaacctgaacgagatccgctcactcaagatgccgcctgaacccatccacgacgtcctctcagccgttctgatgctgcttggaatccaggacacgtcgtggaattccatgaagaagttcctgggcaaccgtggcgtcaaggacgacatcctcaactacgacgcccaccgcatcacgccggagatctccaagaccgtcacgaaactggtcaagagcaagaattcctcgttcgaccacgagaccatttaccgcgtgagtgtggctgctgcaccgttggccacgtgggtgaaggccaacctcaagtactcgatggttctcaacaagatcgagccgctggaaaacgatctcgcagaggcaaagaggtcgcttgaagcctctcaacagcgactgcttcaatgcgagagcgagttgaagaagattgacgtcaaggtggaccagatgaaggtgcagttcggggagaagacgaaggaggctgagatcttgaaaatgaacttggagcaagccgagaaaacgttaaccaaggcccagggcttactgagcaagctgggtggtgagaagcatcgctggtcggagcaggtgaaggagctggagcatcgtctgaccgatttaccggttcgaatgctgctcgcctctgcgttcacgacgttcctgggcaaatgctccgaggacgctcgtaagcgcgttgtgaaggagtgggaacgtgatatcctcgacggttctaccggttcctcgagcaatattcactttgactaccgtaagttgctcagcacggagagcgaattgctcacgtggaaggcaatgggtctcccatccgacaatttgtcgatggagaacgcgttgattgtttccaattcgagcggcgagcgctgtccattcatcatcgaccctgccagtgcaagcaccacgtggttgcaagctgaactggccaaggatacgacacgtccactgtctattgtgcagtcccaagacgctcggttcgtgaacctggtggagcaagctgtgaggtttggtaagacgttggtgatcctggaagtcgacaatgtggagccgtatctgtacccgttggtccgcaaggacttgatccaccaaggtccgcggttcgtcgtcgcacttggcgacaaggtgatcgactacaacgagaacttccgcttattcctcgtcacacggaacccgtcaccgccacttgcccccgatgcactggcaatcgtcaacgttgtcaactttacggtcacgaagtctgggctcgaggggcaacttctgggcgtcaccatccagcacgaacagcctgagctggagcaggagaagagcgagctgctgcggcaagaagaagagtgcaaggtgcagctggcagcgctcgagaagcagctcgtggaggcgctggccacgtcggaaggagatatcttggagaataccatcctagttgagtcactcacaaagacgaaagctacgagtgctgagatcgagaacgctctcgagcgatcagcgaagaaatccgaggagctggacgagaagcgcgatacgtactgtccgttcgcccacgaaggcgccaagatgttcttcctggtgaagcagttgagtgcggtgaaccacatgtaccgcttctcgttagcttccttcttggggctcttcaaggccacgttggcaacgaaaatggagtcttccagcaccaaagaccgcattctgcggctaatccccatcctggagtacaaggtgctgatgtttgtcggtcgagcgctgttcaaggaacaccgacccatgtttggcatgcacttggtgcatggtatgcaccccgagtgcttcgagaagaacgagtacgagttcttctgtggtgagttggtggagaccgaaaaggggtcgggaggcaacacgccactgccagaatgggcgtcacccgagcgaaaagaggcgtacactcaattcgtcgaggcactgccacggcttgcacagttgtgtaagttcgagagccacgatatgtggatccgatggtcgaagtccatggagtgcgagcagaacttccacccgaagatggacaagtccgggtcttctggaggcctctctgcgttccagaagctgcttgtggttcaggcgctgcgtcccgatcgactacagagcgctatcattcagttcatctgtggtgttatgcagctcaagtcgctcactcccccgtcgcttgactttaaggtcatcggaacggaagaggcaaccaacacgacgcccgtgctgttgctcactacggctggagctgatccgtccaaggagctggaggaggtcgcgacgtcggtcgttggaaagggccactacttcgaagtggctatgggtggagggcaacaggagaaggcgctcagcctgctcaagtccacggcggagcatggcgagtggttgtgtctacagaacctccacctcgtcatcgcgtggctgccagtgctagagaaggagtttagtgcgttgaatgcgagtcacaagttccgcttgtggctgacgacggagccgcacgacgccttcccgcttgttctgctggagcagagtctcaagatcacgttcgagtctcctccaggcatgaagaagaacttgcagcgcacttacgcagcctggaacccggacttcatcgcacgcgggtcatctgctcgcgcgcagcttctcttcttgttggcctggttccacgcgcttctgcaggagcgacgcacgtacatcccgcagggctggaccaagttctacgagttctcattcggagacttccgcgcaggctcgaacgtcatggagctggcttgtcagaccagcgggggcgggtccagtggcatcgactggcagacgctgcacggtctcatggagaacgccatctacggtggacgtatcgacaacccgtacgacctacgcgtcctgcgttgcaatctgacggaatacttcagccaagagctgctgtcgggccagaagagtctcatgcgcggtgtgaagctgcctcaaagctctcaacacgccgactacctggacgtcatcgaccgcttcccggatctcgacgcgcccgccatgtttggcctccccgacaacatcgagcgctccatgcaacgctctctctcgggccaagtgatcgcccagctcaaggcgctctcctcaagcgaagccgaagccacgacgttcgaccgcgagaagtggcgcgcgcagctcggtccgctgctggagacatgggggaagctcaccactggtttccaactggaaggagcctcctcatcctcaagcccgggcaagaatctgcaggcgatggcaccggcggacgccttcgtggctcaagagaacgagtacgcgctagatctggtccaagaggtcaactcaagcctgcaggctctgaagaaggtcatctacggcactggactgctgactcctgctatccagacagtcgcgattgcgctgctcaagggcgcagttccagcggagtggtcgtctcagtgggaaggcagcgagaacgtggccacttggctgcgcgggcttgccatgcgcaagcgtgcgctctccgagtggcaggaggcggtggggactggccagctactcacaaaaggtctggatctgtcggagctgctgcaccctggcacgttcctcaatgcgcttcgtcagcagagcgcgcgcgagcagaagtgctcgatggacggcatgaagctgctgtcgtgctgggagcgcgagcgtctgagcggcacgaagatcgagtggttcgagctcacgaggctgctactgcaaggtgcatcgttcgaaggaggcactctactggaagcggtgtccgacgcccaggagctggtggcggtgccatcctgctacgtggcgttcgtgcgcgaagacgcccaggagatgtacgagaaggagaactgcatcaagacgccgctgtactacgccaccgatcgcgaacggatgctggtggagatatcgatgcccattgcgggcgatagggcgcgctgggtgctcgcaggcgtggcgctgttcctaggcgaataggaagttgaagttgatcatgttcgacagggtcttattcgatggctttctcttttttcaagtgcatataatcccagtcgggcactttgctagggtaaaccgaaaaaatgctaggacaaatccgaaattcacggaagtaaagtgtagtgtaccataatttttgtcctagcggtccgtctaggacaatttttttggtacattatactgaaatcaagtaaaatcgattttgtcctcccgtttggcctggcaagagaggcgactagggataagtacatactaatttgcgccataaaagaactgtcgttttggagctattttggacttggagctgcataaaatcctgataatccgaaataatccggaaatatattacggagaaaataccagcagataccccaatacttaactccaccagagctatcgggtacctctctaactccaaggaatctatttttggagcaacgccattttagctccgaaacttgaaatagctccagaaactacagttctctacagtcaatcatcaatcccgcacacgtcgactatatgaacacacgatcagaaggggtcgttgaggcctgctcaaaccgtctccaaatgacttgaattgtatgggaaaatctgagtcgatgtacaagatttgggcgaaattcacaataggtattacaccaatcgatgtattttgttcgaagttttcttattttaataatgaaagaaaaaaatttcaagaatttcactgttttacgacacaaataaaaattatgctctcctttttggttggttcgttaaatttgtgtaacattaggtactgataaaaacaccgggggaagcgttcagagctccgtagatgacaaatcgcatgctacccacgaaaacatgaacacaatatgttctggactcaactctaaatcgtatacataatacgcaaaaccaggtaaatatacatattatttttattgtgaatagctatgtggatgccatcttgaactagcgtttatttgtcattaataatccttttctaatatgtaaaaatatcgcatctagtctacgttaataatacttatgttctcctgatgtaaaaatccaaatcgaggaggctagttagtatctagcatatttcgcgactttgagcgtacaaaaagtatatttttgaggtattaatataatcggattatgtcatcgcattctaatacttatcttactttaaacgaaaaattgaagaaataccggaatttttcttttttgtgttgttagcacctacgacgaaactaagtaatcttctccatccataataaaaaacatgcacgttttgaacaacaaatcaaactggataatatttattatgacccttaaggcttagtgtaatactggaggacgatgaagacgatcgaacccactgttcgataattatcgtcctgcaatcttgggaggggaccacgcagataaattatagatctacattatcttatagcttgctattctcagctcagccaggtcaagaacagaaacaacttgcgttggttggttcatccccactgtcgctcaaccgctgccccaatgagtctagttcaaagcagtaaaaacgaggctttaaaaaagaaaaggtaatgctggttatgcttggtgtgcatatttcgaatatcctttttatttagtgtttatattcctgccaaagtccatatctcttcgtggcacgtgaggatgaaaccataaatgtttaacaggtagtccggtctctgtcttggcttggtctttttagtcgggtcaacgcgatttctttgcctctgaacggaaaaatgcttggcacagagacatggttattctgagcaaaacgccatagtattcttgccaatgattctgcgaaccttgattaattcggaaacccatgcgcgaccggcgcaagcgaatacacagcccttcaagcatgagctgattaatgaaccgtttgagcagcacaactacatgagtcgactggagaaagaactatcggagtatagaaacttgaagagtacaaggttctggtaatggtattattgctagttagggtgctagcggcgagccaaatgtccataccggtttagcgcactaatttgcggctcccaagcgtgcccatcaagcgcattacgtctgaggacgagaaatcacccgctccgtgaacacatctaacacgaccctgtagtttccacaatgataaagccacgtattcactatgtctcaccgcataatcgatctgccaactcgatctatacgactcccattctcacacactggatatgttctttttcccgtgtcatttgttgtgactacagcaacaaacagcgccgccttcatgcccactcgaatatctctcaccaacgagcacgttgccaccttatcgtcgtccatacccattacctcagcagcaaaaatgtttgggcccaacgagtagtcgcgtgttaatgaactccagcagggtaggacacaatcgaccaattcaacgccaccaatgcaaagctccgcgtccaacataacctcaatccgaaatggatctcatcttatatttttaaaagcgccccagaacgcgcaccacggcacgacaaacgttcgaaggtaagaatatgacagaagcagcgcgtcgtcgcggcgactcctatcaaatacaatgttctatgacggatgctgacacatcatgtcaatcgccggacttataggactttttcaaaatgcagactggggaggctttgtctgagggtataaaggcatacatacgacggtgactaagcgacagcgagctgaaaattctgaacgatggctgcttaggtaagtggacgattgctacgtggcagattcggaagtggttgtggatggttgcattcaaatcactccgtgtccatgcccacagattctcgctacagcctcggcacaaacccgcggctagccggtcacggtctcttcaatgccgggggtgagagcaggcttgacaagatgggtcggatccacggtctggtcgcccaggacaccgacgacgctgccatccacggcgaccgcgattatcgtcacaccgtcctcggtggccatgccagctacggtgatcacgtcgccaacggcggcaacagtggccacgcagcccgcggtggtcatgccccctgccgccaggaccccagctgccagggcagcgccagctactcggccccaacaacccgctactactgccagggcagtgccagcgccaccggcccactactattgagcgccatcgtgcctaccgccgtgcactgcgactccagcttcatctattgcggctgcgagagatcgacaacggcgagcacgggatccgctttatgcgtcagagcctgcccacctcactacagggcaacacgcacgcggacggcgacttccggctggagaagcgctatctgctctacatggcgtcagtgggacccatgactgagggccccactacaaccggggatttgcgcttgtgcgcgcagggaagatcctgcaggatcaccgaagccgatcttgcaagctgagagggtgtctacctcgccaagtacggcgtcaccacgtacgttctattctgtttattttttatggtgttattatatatagcttaacgtaggctattgtgtggatgcctagccaactgctgatcgaccggctcggggattcaggtccgatctcatccgctcgggcgttcccgctgaggccatcgacatccacgtcttggcgaccatcataggcgggttgccgcggtctcccctgaagcggatccagctcgatcacggactgcgagccgcgttcgaggatgctagcatgcgctacaggtacaacgccacggggcatgagcagacacgcgacgtgcacctctgcactgtcgaggaggaggctccagtcccgtcggccagagaggcggaggtgtgggtaatgagcagcaatcagctcgctcacatctaactctggcgtggagaggactacgaggatttcattcctgtaggagaccaagacgaggatgatgaagagatcgaagctctcgatctggaggcgacggcgtcacctttcagaggagatcgctcagttttcagggaaaggaccgagttcttgcttttcaaaattacacccaaatatatattttgtataaaattatgaataaagatgtatttctgtttctaaggtaatcaccgacggaggaaagagcagaatggcatggattggcagtaggaaaccccaatcactctgtttctgtctaacacagactagattggcttattccgccttaactcggccttacatcgtcactcctaattcggccacagaggaacaactccaaattaacaagggggatagctaactcggggcataattaaggtcgataaggaattagagttatgccagaattaccgtggtaaaataagtgaaaggcacaataacgccatggttaaaataagttttgcaagggtgttgtgagcatcttctgaagcagggacgctacaagtatacacgcaatttaagtagcattttccattcgtgtttatctacccgaattcgagataacatggacataacaaaaacatagtctattctcaagaaagcaatccatgttgcactcagttatggctctagatatagtcctaggtttacgctcaacccagcacaccaaagcatatctctgtagtatctctattaaaatcattaaaagccgtccacgtttatcttggaatttcagtttaacatccattagtttttatctgcctccaatcaaaattttacatgtattatattttggccccgtcggcggacgaaaatataatggaatcccaaaaaaaactatccgacatgtttgatgcgagaaaaaagttgctagattatagatatttttggcggcaaacagaatgcagtcattcaatcttagtctcctccgacacagaggacgaggagctccaacggggaccgagttgagaaagcggactacacagattgctttacaccaacataacgacgagaattttatagacgccaagtctgttgtgctacgcgatcatggggtgctgcccgtcgaaatgcccgggcacgacgcccggtaaggagtacgcggccacgacgaccgaggtcgcgcccatgtttccgtcttccgtgagcgtggagcaagtggagcccagcatggacaacgcagtgcaagacatgctcatggatcgaggcgacgggaagcccctggacaagtcggacgacggagaaccggcacccgaagacgacgccgaggctgtggtcttcaagtcgaaggctgctggtggggctaacgctgcagcagttgagcgccggccagaggaggttgtgcatgtgcagtcgcctccgtcgcccccgccgtcgccgccgaggaagtcgtcgcgcagtgccgacgacatcctgatatcgtccacgtaccaccgcgtgcacagcgccgaggtggcgaagcagcaggccaagcgccaggaggagctgaggctcgaggccgagcagcgcgagcgtgaggtgcgcgagtacaaggcgtccatgcagctcgcgtgagcagagtcgcagtttgtaccttagttggtgtgaagtgttaagtgtgtgtgtgttttgctggtccgttgaagaggtgatttatttatcaacggaagttgtggtgctacgccatggtcacgttgccccgatcgctgtccggcgggaagtcttcccccacctcgttcagcacgatgttgatgacctagtggccacgagctgctcgcctcgttgcattgtcgagccgcggacatcatcgatcccaccgtcgacgtggcgccgacaaggaccgggcaacgttttcttccgcccccatgcattgcaggcaagttgcatgccactcctgcttgcagatccgctttgaacccccggccgcaaccagccccgcagtcatggagagcagaccagcgacgacgcgaagcccgcgacagcgagcgagccccgcaggcaggcagcaagcacggcagactcgcgacgagatgaagcttctgctgctctcccagctgccggccacgcgtggccttggtgctcccccaggcactcgcgtgagctaatgaaggcgactgcgcaagccgggccagcgtcgccagaaggcagcacatcgtgatggcatgtggacggagcagagaccggtctggcttgggtgcgctcaattgtccagtcttgagggctgcgctcgacttggggctgctcgccggccggacgccacgctgccagcgacttgataaagctgtccaaggctgtaatgtgtgttctgttcagtgcggggttcgacgctggtgatggctgctgcagactcccgtcatgccggtcgtaaggcagctattgcctgcatacgactgccagccatcctactggactccagtctggaggtgggacccaaatgcgactatagcgaggatagtggggccaagtcaaatctgcaaagctgaagccgctcccactcgcgccccgcgtgatgactcgagtgcgcgagccgcctccgcaagcacggcagacaacggcaacgccgacattgccgagagcccttggtcgaaggcaaaggaagcgcatgcgagagcttcacgctgccgtggttgagcccggcgcagccgagaaattcgaacggcgacctgacggcgggcaaggagagctcgtgaaatccagcagagtcgccgatatgtatcatcggcgcccgccttgagggaaccagcttgaagtcgagcgtaccgtagcggacaagaccgcagggcaaagagttttgcgtacaaatcgcagcggagccggccgacgcgcgtggcggcgaggtaaggatcctgcctgccggcctcgcaggtgcggctgtcaagtgagtgagagccctgctgtctgctgcgcctatagaccgagctgctgctgccgttgtcggtcgccgttcgcgccggcgatggcttcggccggcacttgtcgaccagcgcgattgacgacggcctctgtgtcactggatcccactatgcattcgctagttggggtctgactctttggcccacttcggtgactacggccaaccgctacgacacgctcggcacgcgcacttgaagtcgatgccgccgtcgagcattaggcaaagcccccccgagcgttgagctgtagctgcgccgcctccacctgggcaccgccatgccagcggcggccagcggcgacgatcactcacgcagcaaaagcttgctgggcgcgtaaaagcctgcttcgaaatcacacggtggcccttctacacgggtttcgccccgacagttgctgcatacggggtcactgtagtcaacaattcgaaccttttccggcacaaattcttcaacgtatcacgagtcggcgccccggccacgcccgggtacgacagtgccggccgcctgcgcgccgcagacgtggcacgagacccatttcggaggacccatttcggtgccccccagcgctgctgtctgcagcctgctctcgttgtcgttctcacagcgccagcagcagcaacgacgacctaaacaaataatagtacgggctgtattgagttccaaacgcttgccgacaccgtttcaacattcgtgagaccgtgcgctgaaccccgccgggaataagatcgatgtctccgaaccgaatattttatccgtagccgatacagcggcgacctaccattctcagcgcaggctggactcaaatatcaacctcgcggatcaaggacgtcgaaactccgcatccaaaccagacgcgttctggcgccgcgccagatattttacaatccgcgatgtacacagtgggcccggccttcgtggtgagatcccactgaaatgggtccgcggcctctcaaaaaggggccgtttcgcgccgactatgcaaagcctcgcgctgactgcagcatttggccccacgtcggaaggaaggccgcggagccagcaacgatcgccgccactgcactgcagggctttcctgtctgtctgtctgcctgcctgcctcggttagctgcctataacgtagagttggtcacggcgacggcgtacgattagctcaggtcgctgttcttccgcagctggaattctcttgaaacgagcaatttggttccctatagcgaggggagatgctgccggcgtgcgcactctctcacgtcgccacccactctggcggacacagcagggaccgcattagacacccgcggcagcgagtctcgctcgatccgccgagtcttcatttctcgtttccgcccgcagcgcagagtaggcgctctacactccactctgctccgctcaactccactctcgcgagagtcgcgtggcccacgtcgaaatcccacccatggccatcggcatgacgctcaaccagctgtacgcgccgccgtcctcctccagcagcagcagcgccggctcgagcagcgcgagcgccccgctcaccccgccacaaggccgcagccccaaggacgacgccaagaccgggctccagctgccgtcgcagccccaaccgcagatagatcgcgtgtatcagatgccgccatactcgcagcagcccttcaccccggcggggtatccttccacctcctcctccatgcagcagtaccaacctttggccaagcccggcccgagtacgtccgaggactacgcggccgaccccattcccttcgagtacagccgcaagtacccgcgcgacgacgcgtcctcggggctgcagcggggtgcaacgattgtcacatctacgagctacgcggactcgtacggctcgcaccccgtgtacgcgcagagccagcagcagcagcaacagcagcgactgagcccctacgcgcagcagcagccgcccgcgccgcagtacccggagccgcgcagcttccaccacgacccgatgcagccgcagttccccacgcggccggccacctcgcagatgtacgcgcccatgcccggcagcatgctgccgctgcccaaccacccgttcccgccgctgctggacgtgaccaagaaggagatggacgcgtacccgccggcgcagtacgcggacgtgcgcgcgcccatgacgtcctcctcgggcacgatgcaggaggccatgatcaaggtcaagaccccgctcaagctcaagtactggcgcaacggccgccgcaacctgcagtgcttcccgagctgcaaggtcttcggcgactactcggccatcaagatcgaggacctcaagcagcacgacttcatgtggggcaagtgccgcggcagcctcgtcacggaggtcacgctcaacagcaacgtgacgttcgacgacctggtgctgctgggccgcgtgcactcgctcgagaacatccccgtggccttcgaggaggccgtgatccgcgagtgcatgctgggccgcaccatcgagacggacgagatggacgccatgaaggaccagtggatcaccggcgagcggctcccggacttcgtgcagcaggacggcaacgtggcctgcttcgagttcaagcccaaggtctggaagtacacggaggacatggcccagggtaagtgcaagcgccgcaacgtcaagtactacgtgcagttcgaggccttcgtgcagatggttgccggcgaccgccgctactacgcgtgcattgggtcgggtatgtccacgtccttcgaggtgggctcaagtcgcgtgctcgcgcggcagaagcgcaaggcggcgaccagcgccgccgacgcggccaagaagaacccgcagggcgacatgggggtgctgcagccgcagcagctcatggcgcacaacgggaacccgctgatgcacagcgtcatggccacgcaccccatgtccaaccccatgtacgtgcagccgccgccgagctactcgcagcaccatgatggccaaactcgaggcttacccccgacctttccgcacccgcaggtgatgatgaaccagatgcctccgcagcagcaaatgccgccggagatgcactacccgatgccgcagcagcagcagcagttccagcctcccccgatgcagcagcaacaacagacccagccgcaagttggggagaagcgcaagatgagcagcgagcggccggccttcccgacgggccgcgccagcaagatgctcaagcccatgagtggcgtcccccagtccgtgcccatctgaaggacaagtgggtgaggcgtgttgttgtgcgtgcgtcgacgtggacgatctctatttttcccaagttccttcctatatgagcgtgccgtccccctgcgcgcgctgccgggtatgaagcccgcgctctgggagtaagagcgcgcggttgggcagcgcgtcgcagccaacccttaccagcggccccaacgtcgctgtgtagatatgattttttgagtgatgaaagccaagcaccaggtccgcatgtaaggaccccaagtcgtcaaataaaagtctcggtatttattgtccatcaaatgcccgccatgttcatgagcaaccaagctaagctcaacgttatcgtagctgctcccacagcggccagcacttgagttttttcgtgggaagacgcggtatcttttggctgctccgacgttacacagaggccagttgtggcttcacacggtttagatcggatcggatcatcacgccggacaaggtctcgtataaagatgacgatcatgttggcggtggtgctgctcttggtggtcgccgccgctgttggccaggtgcgggccacgcccgtgcgagcgttggacggcttgggccaccccgtggcctggtgggccgtactcaagctgccgtcgcatgtgcaatcgcctgatggccccgaggcgcgcgtggtcccgacgccgtgcgactgtccggccccggactgcagcaacgtgccgacgcggggctggccggcgctggagacgcgggccacggggctctgctacctctacgcggactcgaagcatccgcagttccgacacttccgggacgtgggcttcgactgcctgggccaaggggggaacgacccactgagccagacgctcaagcagaaggaggcgggcgccgagtactgggcgttgttcaacgaccagctcaatggcgtcgctggcgatttccatccaaacaagaccaaggacgttgaagaaggcaagcgcgtgtgtggagggggcgacatattcagcgcccacgctaagggagcggtggcatttcaaggcgatggcagcggcggcttcttcctgcagacgtcgacccccaacttccccgatccaacgcataacgactcctttgtgagacttggctgccaggctgataacaacgtgcagttcgctcagcacatgatggccatgtcaattggggatagtgaactagttgagctgggcacgaagctgcagcttgcgaggttgtgctcgggcaacttcttccgggacgaatcactgcgggatctactggcgagtgtcagtttgttcgaggatggaccgaagcaggagaacacgagcgcctcggccttttaccatgcgctgctggacccggatctaccggagcaacaaacgtcagacccgatgaaggccgagtttcgcctcaaattgttggacggttctactgaagcacagaagaagagtcgagtgtttgagccgttggcagagaaccagcagcttcaagaatttgtcgacgatggaacacgagctgaacaggatgtgttggtgctggtcaagtgtccacgagctgctgtgcctccgtgggcgttggtggctgaaatgctggattccgatgttagtgtggcgtcgtggtgggacgggagctacggcatccccactatttgtgcgggggatgtcttcaccaactcgccgaatgagttttgcctaaacgacccaccgacgggcgtggagttgaatgcggacgggtctgctccgtacaacatcgagaaccttatgcaagccacgtacgtatcccgtaaattagtagtgttggtgagggtcacacgtggctaattgcttgtttttggtgttgtagatggtggatgagcgacgggagtgcaaatttgacgtggcaactcgttggaggaagggtccctgatggcaatcatggtgagatacgaggaatagtattttttgtcgtttgcatggctgactttcttgtgttgcatgcagccaagtgggggctcacaacacctcggtttggccacgtgaatacctcgaacgcttacgtgacgttcggtgacctcaacatggagggcttcccgtgctccaaggcatgcaatggttcacaagcaggccgtggcggcagcttcttttcgctgatgcagccaagtttgcactcaagtctggtggattccgtcatttccggggcctgcctctgttccccccgtcctattgatgaaggtgctttatctagtgatccagtacttccgacgtttgaggagctccgcatgtgccatcgaggctgcatcaagaaaattgaggagcatctggaaccatctcagttgccagcgttgagtgccaacgcgtcgtccttctggtcggtgggtctgagttgaatcgaatcgaatcggattgatcgaatcttggtctgagcgtcaattaacaaaatgtctataccaccgaattccacaagtaataagtattatcctgggaggacagttagaagagctgtatggacagcctcacagattaattcgtcgaaaaaaagttgcttgtacctcaggcaacatttaaacatcatctcgccacaccatactcacacaatcgtacaccatatctacacaaatatagccatattggcatcccgactggtaccacacaaagccaattgacaatgaaatgaggacagcgttagcgacaagagaatgcaggatgaccaatcagcctacaactacactgtattccatagttcctagttactgacggataactgaggatgtcttacgtccacgtagctgagctcttggcttcaaattaaacctgtccgcctggatctcgggcagcctcgctggcattagatcattggctccatataaaaatggtggtcggcgctgtaaacgcttacgtccttagctcttggcctacaaactataaaatctgcccggtaggcagcttcgccggcagtagatagttggctccatataaaaaaggaaaattccggaatatgaactcaaaatgaatatgaactcaaaatgaatatgaactcaaaatgaaattttgtgcaaaaggtgatacaaggctttgtgccaagtgcatttgaaacaattggcgggaacccgggtacccatcgggaccccggtttccccaaaactaccggtacccatgtatgatcaaatgtattggagtgttgttctatgacctacgttgaacgtagcttaagctcggtagagaaacggaaggtgaattcgtctttgctcccgtcctgtgtctctcatgaaaatccagactcttgcctggtacagcggtagagggctttccggccacattgtacagtaaggtggactttgacatggtaaggtacgttattcaggtcactcagtaccggtgacagattagtgggaactctttcatcgagtttgatggtttaacttgccccaacggtaccgatatggtggccgaaaattaaataaataattcgcgatttggtcggtatcatttgcgggaacccgggtttccgccaatggtttcatttggccaccgatagcggccagcacctgaatgccatgcacgtcgctgaatgcaccaattgtgtcagtatagctctgggtaaacgcgaaggcggtgccggtgtaggcattgccctctgctgatagttgttctggtggagtacggtcgccttctgtgtcgcttaagcgacactgcccacgctgcataaagcatcgccgacggcttcgatgccttactccccatgtcgccgctgaaggcaacaatgtcgtggcccaatgccctaacaaatgctgctgaacctgaaatatgtgctctcgacacaaatccttctatcaccttttgcacaaattttaatattgagtcaccttcctgtaatttccataagaaaaatgatggtaggcgctgcaaatgaggggcatagcccctcatttgctacttgcatgcgaacatagtacgtaaccactgtttggtactgctagtgcgtgtattgatggttgttgttttggatttggcttagctttgtagtggcgccaaaacactcgaccactcagtaggcgaagtattagcacaagacttggctacttcgtagccaaagaagacatctattagtttcttgaaagtgtgccagtatggaaaatatagttgtactcgagttagtaaaatcgagctaacgttagatacaaccgagcagactttttggaatttaaagtagtcctcccagcctaacgcaacgcacccttgtatatattgtccctacttccaggcggaacccacactatgttattcgttttttgctacctagccattcaaattcaagcgtaaagtctgcatctacaaaatgaaaacaacatttttcgttaaaacacacccaactgcttcgtactatcaccgaatgctgacctaaagtgttgaagctcgtacttcagcaagttcagcatttcaacgaaaagtaccggggctacctccgtttcaagtacacatgcaagctagtacagcggagaatacgagaacttgccctttaaaactgcgtctaggacgagcaacgatcccatttccaagactgtgaacactagaacacccacggcagcacttggtccccaattgcctgcaccaccaccaagaaagaagacgatattcggcaggtgctcgagtaccgatgtaaaccacaaatgctaacggtacaatgcagtcacgtactcgacgcgagcgagatatttgcagcggaatagcagttgtaaaccctgtcgaaccgagtcaacaagcgaaaatacacatgacatttataactggtttcacacgtcaagcgaggcaggtccgtcgagctatggagtgttgtagccacgagtggagttcatcttaatgcagtggacggctaggtttcctcctcgacctggttggtcagcttctactttgtattggcgtacactcgtcgagttgtaaccagccttgaatcgattattaatgaagaaatacgccagtggaaatcccaatgatgttggttcttgtggacgagctgatggtgcgcgtaagattgcgtgaagtttctgatgatcgcgtggtatgaagggagtacatgtacaaacggtattgggttcccagcacgagatagcggatggattctgttgtaagtttagtatcagtgattctgtatcgcgaatcgagtagacgacggttccagagcctacacattcttcattttccttagcgctgcacacaccaaaaccgttgtcaagtacccgaccaagaatgcgatccgctttccttctagccatcgtcacgctcgcctcgttcagcgtcatctcgactgctgctatccagaatgagccaacgaccccagtccctgcaacgaagctgcgtaccattaccgacgtcccaaccccgccccagacaccaggacttgcagatggaaaacgtcgtctgggcatcttcgacttccttttccccaagagcacccccgcgccgccgcggacgcctcacccggtcagcgacgagaaaggtccgttgggcaaggacggtggcgtcgacatctacgaaggcgtttgggggttctaagttctgcctttcgtatcactcgcctgaagccattaagtcggttttgtcttaagtcgagcttgaggcatccgacccaagtcgcccggttggggggcacatttcccatgcatttggtattcaagcaataccagtagcaccgagtttttgtcgttggattattttatcgcttcttcttcttcttctatttttttcctataaatcatttttaggaaggacaagtgtctttcgtataggtcttggctaaccaggtcaggagggtaccgtttgctggtaatggtgtactgtacggcaactattttggggaatgtttcgaagcaaaatctaatgttttttttccttgggtccctcaccataaactttatttagctgtctcgactcaccatttcttgaaaatatgtgcaagatggctgagctggaagtgtgggcacaaactgtgaacgctacgtctccccaggtgaagagtctttcgcgacaaaagtcaccgcatattccactcatgaggcgtatcacaaggaaatggaacgacattcaagttgaacgccagggcgcgtactccatcgagcgcttggaaagcctcaacctgtattgcaaaaccacttcccggcgtcgaacagtgttggtctgcctactctccccagtgcctgccttgttgacagctctgttggtagaatcgttgccgctgcgaccgccctcggacgggtggagggccaaatgggtcttttggctgcgtttgctctcggttcaactgactctgggcttcatcgtgaactctcaaatgatgcgattcatccccggtctcaacttcacaatcggtaaaagaataacggtagctgtgggggccagcacctcattcattgggacgtgtctgattgctgccagcacgattgggttcccagtgccgctcatgatgcagtttgcgccgatccccattgggatatttacgccgcttatgaattttctagtcttgggccccgtccactttgacaaggattcgccattgaaaccacatgccgaccggtacaaccggtccttcctgtcgtttttgttctttgcagcgcgttccccgcctacaaactgctgttcaacgcattccggtcggatatcgaggtgttgcagtcgttattttgccaatatggaagttcgcagtcaaacgcttcgctgtgagctgtacacgcgagctggaagacgtcatgccgctgctagtggccttattggtggatttcttgagtacgttgctcatatcggcgtgcatgtcgacgacaaggtccgtatccttgatgctgctcttcatcgcagtgaacatcctccaatcgctacttgaattccgagccatgagagcgaatgggaaagcgctcttgaagcgactggacgagcgaaaaactctcaaacacttatccggacgaaactcgatacatcggaagctaccaatttactgctgattattctcgacgctgtacagaactcaacttcgcttccaccaaaatccctggagagagttcgactgtgggcgtgtttagcgtatccactctcggcagacaaactggaacaccttcatacgcttgatgctttgaatgtatttaggagtaactatgatgcaagcatcaacaactatgctctcgatgacaagaataccaacgcatgcgaagtgcctcaattactctattgactgcagtcgcggtcgatgatacaatgacagactcgcaatcagaagcaagtgctaaacaatctgcaacgcggcacaaccaaaggtcgaagaaaattgttcttcaaggcgtgcagctggctctagtccagtacgttgagtcgataacccccattgtgttcttcatctacaagtccgtattggagctactgccgaacgtcgtggtagctggggacatggtgtcgattgcgaacatttcgctatttgcggtgctggaagttgggcttttgatttcgttcagcacgttcctgcggcacaggttcaggttctcttcgctgtatcagctggcgtttgtgctggaaacggagttttatcccgttcaagcgattctttttgccttgattctcaatgtgctgcagtacgagctggagcatctcggtcagtatccccatcatcacagaccgcttcggatgtttgtttaacatttgtttttttctgtaggcgctgaatttactcttcaatttgaatggctccaccgtccggatccctaatctgttaagaactaccggtagcgtttgggcttgacacggaggtttttcgtcgtggggatggtgttattcgtgttcattcatgttgtatcatgttgcaatacgagttgggatatttcggtcggtatgctccctcgcactttggcatcgcttatttttacgggttatatcattttatcacctacgaatgtactacataagaataaggcatagttattttcatgtcgtactgcataagaataaggcatagtcattttcatgtcgtccgcttcacttcttgaaacctcacacgcaagatggcagaagtggaggtgtggggacaagccccaaatggtgcatcgctagtcaagacgctctcacagcagacgccacgaccaaaatcctcacttcggagacgtcttggcaagaaatggaacgctatccaggtcgaaagccagggcgcatactcggtcgaacgcctcgagagtatcgacttgtactgcatcaccacgtcccgcactcgcgtcgtgttactctgcgtgttgtctcccgtcccggcgttactggcggctttggtggtggagagctttccgcttcactcaccgacagaagggtgggctgcgaattgggtcttctggctgcggttgattgtcgcccaaagcacaattggtactgctgtgaactcaaaggtggcgaggctgataccaggccttgagtttccagtttggaagcgagtagtaatggcgttgggggcgacggtcgcgctagttgctacttgtcttcttgctgcgagccagatcggattcccactcccatttatgatgcagttctcagctattccgattggaatttactcgacgctagcgactcggctggggcttggatccgtgttgtttgcgaaggattcacccttgaagtcgcacgccgaccggtaaaaccgcttctttggctcattcatgctactttgcggcgtgttccctgtgtacaaggtgttgtacgactttatccccgtggcgtatcagggcgttgcagttatcattctgccggtctggaagtttgcagcgcggcacttgattgtgcgaagtacacgggaccttgaagatgtcatgcccgtgctggtgactctgtcggtggatttcttgagcaccatcttcatttcagtgtgcatgtcgtcgacaaagtccatgtcgctgatgtttctattcgtcgcagcgaatattggactatctttgctggaattccgagccatgagtacaaacgggaaaccgcttctcaagctactgggcgagcgaagaaactcccaatcatttacagcatcgccgtccggggctctacggattcaaaagaagtcgaacgtatccggtagtaccaaccttctcaagatcatcctcaatgttgccgaggactccgcgtcatccccgccaaaatcactggaaaaggtttgcttatgggcgtgccttccttaccccctcacgtcagagaaactcgaactgctttctgctcttgattcgtcaggtgtgtacagaggtagccgaggcccaactagcagaaagaagaaccaagaacagaagaatcaacgaagcacgcaacgttctgaacatccacgggtacgaagtgtatcgatcgctccaattgcaggaaactccggtgaagtcgcagcaataagctcaccaccggacgcaattgtcgaacatgggaccacaccgaggttcagccaaagatcgaggaaaattgtggttcaaggtgtgcaactgctatttcactcggaaatcgtggttcttgttcaatacgttgagtgcatcgtgtccatccttttcttgatatctaagtcggtgctggagcaaatgccgaacgtggtgtactaccccggctgtgctggcaactgggacttggaatcagttgtgaatatttcggtgtttgcggtgatggaaattgcgttattgctctgtttcaactcgttcctgcgtcaccgatttggcttttctcccttttatcagctggcgtttgtgctcgagacggaggtgcacgtggttcaagcgatccttttcatattcactctagtcgtattgcagtacgagctggagcatttcggtacgtttgcgcgttggggaagtatgcccgggaaggttgcgtgtcctcatttagttgcgataccgtttttttttgttttgcgctgctgtaggtgcagattttacactttgcttcgtgtggctccgtgacaagtagctgtaggtagacaaaaagcacttcaacctaccactatttttccgggtgctcttattacttcgaagtaattgcataaatgcatgcacaaatgattcggcgttgattggaaatcaataactgattatcgcaatatttctgaagcattattcagcagagtaaaactaatcagattaccgtcttaccccgcataaagcgcctagatgtagtaataaaaaatctggtgccaaaaccccaacatgtaaacccccattataacgcagagtctaatacaaggacgccctcgatgaaagggtttggtagcattaactcacaaccaatgcctatacatttaccctaatgtaaagtaatactcacctacaaaccaaccattcctgatgccagcaacgcttgcttgctccaacgccctcacttttcaactcactctccgaagcaacactactaccagctcaagcactcagcccactatgccaagctcgcgtcgcagctacagcatcacagaaaagctgtccattctggctgaatacgaagccggtgtcgagggaagcgggtttcacgcagttagtctacgccacggcgtcgctgccagcaccattcgagggtggtggcagcatcgagagaaactgagggctgcgtcgcgcaaccgacaagtcgcgactcgcacggcacgacggctcaccggaggtggcagaagacctgccaacagcgagcttgaggcacggctgtatgagtgggtcattagccgaaaccgaaaaggcctgcgggtgaaggactcacacatctgccttcaagcacgcaacatccaccgctagctacatggtgaagacggtgtcgggtttgaggcgtcctccggatggcttgctcggttcaaggctcgtcgaaacctggtatcgcgccgccagaccacgtcgcgctcgttgcctgctgacgcaccggacgtttgccgcctgttcattcagagtgtccatcatctgattgccacggcatccagcccaagaacatcattaacatggatcaggtacctcgttgcttcgagaccgagcccaaggcaacgataactacgcgaggttcgcgtgaggtcctgctgcgcaaaggcggatccagtcacaagtggttcaccgcaacttttgcgatcacggcggaaggggagtttctgaagcctcatctacttttctcgaagctgaaaaacaagccgaagtgccctcccggcgtcctggtagatgtgaaccggacggggatgtggaatgatgacctgcttctcgctcatgccgaggctgtcatcggttcgcgcaaggaaacacagctctatcgtgggccggtgcattacctgatcgactcctacggctgccacgtcaagctggcagactccaagcgactggagcgctacaacatttttgtcgtgctggtcccacccaacctcaccaacatgctgcagccacttgatgttgctgttaaccgcagctatcaagaatactaccgctcaaagtatgacgcgtatatcagcgaagctctccgtgaccccatgctgcagacgaaagctggaaacccaaaggtcccgcgatacgacgcggtggcgcggtggacccttgattgggttgcctcgaaggaccccgcggaggtgaagaaggcgttcggcctgtgtggaatagtggcgaaggaacgcttcagcatggatcggctgcacgctccactgaaagccatactcagctccgacttcaacatgcatgcatggcacacagcctaccagcacctggtgaacgacgactcagagcgtgagctggtacgtgtgtttgccccggactggtacattccagacaacgagaggaggagtctgttctgctggctgtctttcagtctcgatatgtccgtgcccgagtacgccgaagcgcttacgacctacatggctaccctcgtggacttgaccggactgctggacgacgagtacctggtctctgtaaggaaaggactgatggccccgggtgagctcgagatctacgcggcgtcgaaaatgcacgggtggaacatcaccctcaagactgttgacgaaggcagccgcctcacctccagctttgtctatgctgcggagaacgctactaaggatgttgtgcttgtgcgcggcgatgggtatttcgctgttgagattgacggatacctgttgtaggtagacacagagctaaatcaatactgcattgattcatacaaaaagacatgttagtttctgattattgtgggcgattgaaattgacaagcgttggacatacctttctgtgcggggaattaacgattgactcgcgacataccctcttcccataacgggccctcaattgacacgaaccgggatcgaactatggacctgcggtttgccaatccatgcttgtaccggttgagccgtcagcacattgcaatttcgcacgactccagtcatatttatcgcctcaaaactatgtttggtgccattgaggtggcccgccttcaaggttgtaggatttgttcgtagcataccgcctaggcggtttaaacgaatattacgctcactgggtgctatattttatttgtgcgcctatgcgcactatgcggggtaagacagtagttgtttggctgcaatgtcgtccagctcaccgcgtaaatcgccacaacttccagtgcttatcatacgataataagagtgtgtcgccgaagagagacgctcagaagctaaaagtgatgtaaagagtttctttgtttgcaaagcttaaccctagtggacgcctaccatatatgcattaacgggctgtcatagttgcagcaagtatgcctggcatactcggcgcataaatctcccggggcccagatctggtgtcaacacaccgccctactcatagatatatgtcgtgtagccatcataaaggtttgacttgcgatttgtatagtttatgctgaccatcactcctacatatgtaaacttcactatgtgggcttttcgcgtatcatataccttccgacggatcgaaacgacggtcatttgcgaatttgcctccgacagcagcaagtcgacagcagagctccgcttcgaaaggtgtggttgcttgtagccaaaggactgttgccggtgatcacgaggactcacctgttgtgtgcgtgcaggctatggtgcgcctcacccattccgctgctcactggcaacttcgctgcgtcttcgacacgtccagcgaggacgaaaacacgccgcccaacgtccaggcaagcccgcagtgcacccaaggcagcaagcgcagcgagcagcccgccagagactgcgccagctccactggcaccgcgactcctccatggatgccgcaggagaagtgccagcgccgctccaaggcagtgacgaatcgaccgccaagcccggaggcaacacccccacctgcgtcgccgccgccgacaacccgtcgtcgtgccaattttgctggagacgccaccaacgtcgccggcgcgccccataccacgcaaggcgcttcagccccgccaagaaggacgtcgtgcgcggcgtgaggctgctgcgccgtacagccgtcgcctgtcggtgcctcagcgcccggatcgacccgccgtcgacccacgtggatcgatgagcgccagctcggatgtggtgcgccgctcgccaccgcaagcacagcggccacgtgatcagttcgtgccagctcggtggccatatcacgtggcccacctccgcgagcagttcaatccattggcgacggtctttccggcggtgccacacttcgggtggtgcgactgcccgtcaccgtgccgcgtggacgcctgccgcaactcgcgcatgcacctgtattgcaacattaattgttgcccctacagagacctctgtgggaacgcgctgggcgagtcgaacaagatctacctggggaagatgtgcgcacaaagacgctcggagtggtcgccgctgagtccattgaagctggaaaagtcctcggtcaatacctcggcgagatggagcacgtcagcgcttctcgcgcgaattaaccgcgcaacaacgggtatcgtttggtgatgaagatgcagccagagaggcccacgtaccccgtccgtgtggcgatcaatgcagagagcatgggcggcctcatgcgattcgtaaagccctcttgcgaggctctggcgaagtttgttgaggtctccaccggacgccgcaccaccgttgtcgtggcgagcacggaagacattcgtcagggtcgagaggtgacggtcgtttatggcgacgacctgtggttcgtctgccgatgcggatcggacagatgccgccatcgccatctccaagatgctcaagatccgtaagggcgcgaaggagaaaggaagccagaagagcgagaaagacaaaggcgcgtgcaaggcgataggtgtgttgatatttgtataggtgcgtaatgtgaacaaatgaagattgcattgatgaaaagagttcgagtctcctttggctgacgtcggctgagttgcatctacgttgcaggccgacgtgagtgcatgtagctcgcgcatgtacttcgtgcctacagcgttgtgttgaagctcgttcggctcacgccgattttcgcacccatcgacgagaaggcacatcgcagtaagcccgcgccagagttcgcgtctaatgacgagataggctcacttgagcgaggctagccattcacattgaatttgtagttgttcgtcacttactgctaagcctttaaatcgaatgtgttgttcattatcatgtcgcaagctcattgcagtgttcgattctcagtcatcacattctagtcaattgtagcaatcacgatcagcaaatacagttcatgcagaaggcggttgatgacaacgcagatagcgaaagcgctcaactcatcttcggagagaaacatattgatcgcgccttacagagtcaacatcagctaaggcacaatacgatgacaaagagaaatgtattgttcacatcttacaaacacaaacatcatgagctaggctcctactcgcttgacggcggcagctccatttcgcccgagaacgtcggtcgaatctgcgagattccgaccgtgcgcacacggtagttagccattctgaacacgttgctgattctgcacccgcggatgttggggtcgtacggcagggggaggttgaggtggctgtacaccttctgtatgctgcctatgccccattcagccgcctgccgtacagaagtgattgcattgtggagcgttcgcgcggagctcctgagcgacggccgaattctctccaggtcgccgtctttgagaggcgtcaggatgcgtcccaccatggcagtcgagcatggaaaagcggagtccggcaccacattcatacgcgtatctgggcagtacgcggggtcgagcaacttggcgcggaagccaagcgaggtgtccaagtcgttccacgacccgggacaattgtgcttactccaaatgatacagccgtcggcggcaaagcagatcgtgccagtcacgaacacggtgtgaagccacccgttgtacatggcattttgcagatccgcattcgacggctgctggacctacagtgcagtatttgttagcgtgtagcattcttagcaaagcaaatattgatttcaaatgaaacttacccggaagttctttccatcaataaacccaaaggtgtgtttgagaagtggttcgcgagcctccaccagcttcgccaactcggcttggcgagctggggacggccacgagatccgtgcgggggcctatccgcttagcgcctgcgccagtgcttcctcggcgcgcgcaagcgtcctcgacagcgtacttggcgggaccccaaacagcatgcaaagggagctttgctccatcgagccgacatagaagcagagcacgaggccgagcacctggtggtggtgcttccgcttggttggacgcccgcgtgtcgtgtggcgcggaatgtagtagaagcggctaaaccgctgcaggagctggttgaaagccgacctacagcattgcatgtcagatagagaatagcagcatggtaaacagttaatatggatcgcacctggtccaacttgtcgtgttcaggaagttcacgtcgctgccgtacttgtataccatcatccaggcggggtatccaggcactgggtggtcaggtagtgcctgctgcgcatagcgatcttccaagcctcccccaccagggcgcggtacacctctctgcgagcgtcatgcagctcctcgtcttgctcgaggaaggtgctggcgagcaccagcagcgcatcggcgtcctctgcgtgcatcctcgtgtccgacgcgcgccaaattcaaaagtggcgaaatctagaagcttcctgacgtaagtgatgtccatggcaaagtgacgggtacattctaattgcctgctgttattgcctgattcagggcacttcaacacggacacagatgctcgatgtaaggcatttgtggtagatgcttgtagcgatatgccaacatatatctttttaaggcctgacataccttctgcaactatgacagcccgttaatgtatatatggtaggcgtccagtggcttctattagcgtttgcgtgttaccacaagaacagctgctgctgcataaatctctatttagctgccctggtgttgccctcccacgtaccactacttacaatctaacgcaagatggctgaagtggaggtgtgggaacaagtgttaaatgctgcatcgccatcatggcaggcatcacgaccaagacgatcaatccgccgacggctggaggacaagtggaaaagcatccaagttgaaagtcaggacgcgtactctatcgagcgcctcgagagtctcaacttgtactgcaccaccacatccaccagtcgtgtcatattactatgcgtgctgacgccggtcccagcattgctggcagctttggtgttgcagagctttccccttcgcccaccgacagaagggttggttgcgaattgggtcttctggctgcggttgttcattacccacagtatgattggtgttgtggaaaactcaagcatgaccagactgataccaggactcgtatacccggtttggaagcggatagcggtagctttggtgacgaacgtcgcgtttgttgcgacgtgccttcttgcagcaagccagatcggattcccactgccatttatgatgcaatttggcgttgttccgattggaattttctcagccctagcgactcggctggggcttggcccagtgttgtttgcaaaggattcacccttgaagtctcaagccgaccgctataaccgcttctttggctcattcatggttctttgcggtgtgtttccagtctacaaggtgctgtatgacctgataccagtgacatatcggggtgtcatcgtggtccttctgccagcgtggaagtttgcagcgaaacatttcatggtgcgcagtacacgggatttcgaagacgtcatgccagtgctggttacacttgccgtggatttcttatgtacaatctttatttcggtgtgcatgtcgtctacgcagtcaatatcctcgatgttgcttttcgtcgcagtcaatattgggcaatctctactggaattccgtgcaatgagtgcaaacgggaaagctcttcgcgagctactagacgagtgaagaaattctcaattattgacatcatcaatggccggggctctatttattcaaaagaagtccgacacatccgatattagcaacctatccaggtgattctcgccgctacggagaactccaccacattgccaccgaaatcgctggaaaaggtccgattgtgggcgtgcttgccttatacacttacgccagaaaaacgcgaacgtatccgcgctcttgattcatcaggtgtgtaccgaagtcgagacgacccaactagcagagtgaagaaccaagaacagaatcaactgagcacacgacgttctgaacgggtacgaagtgcatcgattgctccatgtaactctggtaagaccgcagcacttagttcacagccgaacacaattgctgaactacacctttgtgcggcctacttcgtaccaacgtgcactcaaatccgaaagtcgcaaaattcatattgcaaatttctagttagcaacttcaattacgcattcaaagatggaattacggcaatcaaagttggaccagaggtccaagatctccatggctacgtaagctggcgtgctgtgctcgcgccaaaagcaagggcgcgcgcactatagccgacgccgtccgaggggagctcacttcgcaattcgccttcttcttcgcagatgtccctccaaggccgcgttactcgccacaccgtcctcgagaagcagcgtcctaaaatcccgcattaagcgagacttggctctgggtcgccacgcaatctacgatcgctcgcgtgagccagacagcaacggtgagatcctctccatctcggaacgccagatgcacatcctggagcgcgccgcgaccgctaacatgaacgtgatgaccccagcgctggtggccagcatggagctgcactgtcgcgacttcgccaccaaggcggcgaacaacgaggacatggtgtacggcatgtaacagggctcgtcggacaagtagtagtagcctactgtacgaatttgattgccgtaattccatctttgaatgcataattgaagttgctaactagaaatttgcaatatgaattttgcgactttcggatttgattgcacgttggtacgaagtaggccgcgtagggtccacaccagggcacagccagagatcgaaagaaattgtggctcaaggcgtgcagctcctgtttcattccgagcttgtggctcttgtccaatacgttgaatgcatcgtgcctatcattttcttgatatacaagtcggtgctggaacaaatgccgaacgttatgttctaccccggtgatgctggcaactgggacatggaatcgtttgtaaatatctcggtgtttgcggtgatggagattgcgctgttgctatgcttcaacacgttcctgcgccaccgatttggattttttccgttttatctgctggggtttgtgctcgagacggaggtgtgcatcgtccaagcgatccttttcgtctttgttctggtcatattacagtacgaactggagcattttggtcagttgactatcgccatttagattttctgctgtcagtttaacactcgattcgttttgtgtctccaggtgccgactttactcttcgtttcgagtggcttcgcagcaaatagttcgacagcatcccccctcccaaactttttgggcggattgggacgcagaactaagtgtgaacattgggtgaaaacctttcgtccgctcgttttttcactttacccaagaatcccaagacaagggaaagctgctggtgtaaagcaaaacatgtcgctgtatttaggtgttgccatctttctcttccttaaaagttgcagttgccgtttgttacttggaggccgagatgtagagcacgttgttgccgcggatgaagcagtcgccgtactgcgccttgagctgcccgttcgagtactcctgcgtctgctccatggcgatgttcatgaagccgtcgaggcaggccagcacgcccttgtactccacgccgttgttgagcttgacgtccacggggcggcccagcacgcccttgaggaagtcggacggcgtcttcttggtgctcgcttgctcttgctgctggttcgccatcctaattcgctaaatgggagcggaacgtgtgattggtgtaaactacgctttagatacgcgttttattacgctttagtcactttgatgctgcgcgtaaagcgttattttgagaaatggatcagttgcagcgagagtatctgcgcggcgccaggcggaaggcccaacctgcgggctatttcgacgcggacgatagtggggatgagagaggagaagctcttgctgctgctgcggacgatggaggcgacgaagtggacccgctggatgcatttatgcagggaatcgacgcccaagtgacgcaacaacgcaaggctccacctaaacgggtggctgacaaggtgagcgtcaacctgttgccaaagaactaagacaagtgttaagtgtatatgttctttatctatgcttgtgaatgacagcctcaagtgttaaagcacgaagacgatgatgcagacagttatctggaggaatacgcacgggtgagttgcatccgtttaacactggcttaaacttccagaacctatactaactttaagcacttgtttaaacttcttcctagaccacaaagaagcctcgtgctggcttatcctctggcaacgacgactcggacgaagaagtttacgcaactgccaagcaactcgacgacgcagatgcacctgacgaaatggcgaagaaggtgatggaagttttggctccaatcgaccattccaccgtccgctacgagccattccggaggaatttctactctctccacagtgaaacttcgtctctctctaaccaggaagtggctaagctccggttagagttgagcgttaaggtagacggatccgatgtgccagctccagtgcagtcctttatgcacctcggtttcgaccgtaaaatgttgcacacgctcatgaaactcggactagaagcgcccactgcaattcaagctcaagctttccccgttgctctttcgggtcgagatttgatcggaattgccaaaacggggtcgggcaaaacgttggcgttcacgttgccgatggtttgtcacgttatggaccaacgcgagttgcaacgaggtgaagggcccatcgctgtggtgttagcaccaactcgagaacttgcgcaccaaacgtacgtacaggcgaagaagtttcttgcagtttatggagcgtcgtgtgccgcgatttacggcggagctggcaagtgggagcaggtccaagctttgaaaaaaggggtcgaggtggtggttgccactcctggcagattgattgagatgattcggaagaagactgcgccgatgaaccgcgtgacgttcgtggtgcttgacgaagcggatcggatgttcgaaatggggttcgagccccagttacgctccgttatgggtcagattcgcccggaccgccaaacgctcatgttttccgctactttccgtcgacggattgaggcgttggcgcttgatgtgcttaagaatccggtgaagttgacgattggtctggtgggtcaagcgaacgaggacattcggcagattgcggtggtgttgccgggtcatggagcgaagtggccgtggttgatggcgcgtattcgtggactagttgacgaaggtcgactgcttatctttgctggaagtaaggctggctgtgaagaactggccaagaacttggcgacggcttttccttcagctccagcgctgtgcctgcatggcgataaaacgcaacaggaacgagcggaggcattgtcgaagtttaaacacggagaatgccgcgttctcgtggctacggatgtggctgcacgtggtctggacgttaaggatgtgaagaatgtggtgaactttgacgtggcgaaaaatatcgacacgcacgttcatcgtatcggtcgtacgggtcgcatggggctggaaggtttcgagcctggaactgcgtacacactggtgactcgcaacgagtcgcagtttgctgctcagctggtgtacaacatggacgtctctggtcaaccagtttcagccgagctgcttgctctagctaagagagattcgcgtttccgtcgaggtggagctgcagctcgtggtaacgcaccgactggaaacgacagaagtggtggagcgggatggcagagtgctcctgagagtgctggacaagcacctgttgttccagctcaacaaccgaacgaaaggggtctcgatgcggaagatgctgcggaattggagcggtggaatgacactcgtcgcaagaacaaggctgaccaacgcaaaggcttgggttttgcagggatggcgagttcaaaaccaattggaagagctagtgggatgagcgggtttgtgaaggcgtctgcgcctgctgcctcctcgctggcgactgcttttcggtcgggtttcgtgaagtccacgctggcctccgacgttccccgtccgtctccacctgccccgccaccgatgagctcggtagctttatcaccgccccaagctccagcaaatgcatcgaattcgggtgctctggtaccgccgccaccgccaccacactggtctcgagctcgagcgaacccaagtgttgcgccctccacgatgctggttccgccgccacctccaccggccgttgtggcattaacacctgaagactcaaaagactccagcgcatctactgagaaacctcagccaagcgggcagactcaagtagctcatcgagcccctcgatcacaacatgaaagcgacctacggtcgagaagtcgaagccctcgtagccgcagtagctcaagatccaggagtcgccggtgccatcgctctcgatcaagttcatctgaaagtgatcgcggacgacgtcgtagatcgcgctcaagagatcgtcgacgccgacgaagttatagctctagccgcagcaggagtcgaagtcggagcaggagtcgcaaccgtgatcgtcgttaccgatcaccttcgcgatctcgctctcgatcgagacatggccatcgtaggcgctgagagcagcatggagcagcgcttgggtggctgaaggaagcaatcaatgtgcgaggaatgttatctttcatatcgagacaatcaaagactacaggtgtctgcatacgtgtacactgctaacgaatgcaaacgaaggagactagactcaaggctataggggaaactacatgatactggggcggcggcttacatagttgtctgctccgcgtggctgcatcccatcaaagagcgaatctattgtctgtcaattcacgcctgcgcctccggggcagcagcctcctctgaagttgtttctaccgcagctgcatctgcactaggcgcctcgtccggactgctagcggcgctactctcctccgtcgtctccgccggggtcgcctctgctgcctcagcagcagcagaagcaggtgctgcggcgggggtctcactctcagtctcagtctgcatcaggtctacagtcgttaccacctctggcatggcctctccatcgtcaaaatcgtcgtcgttctccatctccataccggggatcggctcgaagggaatgtcctcgaacgtgtcctcgaacttggcccagctgccgccagactcgaagtttgcccagcggtccgtgcccatgccgccttcgctatccttgggggcgctctcctgtcgtgcgagctcctcctcgtcctcctcctcgctactgctgctgtcgttcatgatctccggcagcatgggtgtgtcgctgtccttgacgtcgaagtccgtgtcaaaaccattagggtccgagccgaagcccgacgcgcccagcatctcggcgaactgcgcgttcagaagctcctcgttctggttgaagcccatgaccgagtacggatcttcgccgccctgagagatcgtcacgccacccagcggcagacgctcgcgctcgtaaatgggggcgagcaccttggacgacagctcctcccactttttccacgtgacctcgtcctcctcgaacagctccagcaccgtgtccgcgtgccgcatctcgttgagcgatccctcctcgttcgtgctgccgcgcacgtcctccagcatggtcataagcatgttgcagatgcggtggaggtgccccacaaatccaagcgaaaatccctttgcaacggccgtggcctcatcgttcttctcgtgcgcctcaatgatgcggggcagcagacgcgcctccttcactaaccctacgagcagctcgtggctgccgctttctaagatgccgatcaccatgctctccacgtccgcgtggagcatgttgaccaactcgaacttgaagaacagatccaggcaaatctcgatcgcgtgctgctccagcagcgcaatgtccaccttctggtacttggactgcatgagcagcaccacgagccccaccattttcagtcggcgcagtcccagcctcgggacctcctggtggcgctggttgcgaatagttccggcgtcatcgccatcgatcttcaagatggcgcaaatctgcggtagtctctccacggcgcacgccaccgcggggggcatctcgtccgtggcgcagtactgcgcgttggtggcgcgcgacagcagcgcgctcagcaccgaaatcgctccggtcatggacgaggtgcacgaactggccgcgccttcttcaggcacggcaagagccacgagcttgtccgccacctccttggtctccaggtgctccagcagcgcgaaagacacgggcgaagtcgaactggcgggcgacgccgggtcgctctgctgcgcgcgcgtgccgcagtggatgatgtccaccagcacctcggacgcgtgcttgtgggcgtcagagtcggcttcaacgtcccccagcgtcttcaacaacaggtccacgaccgtcggctccgactgccagctcagcgtcttgtccttattagcagtgggggtgccactgccccccaaatggtcgtcgtcgtccccgtaccacgagttggaaggtgggaagcccatcgacatcccggggaagtccatgcagtcgtccatgtagtcggcctggtagggctgcagcagccgcttgagcagctccgcgaccgagaaactggccgcgtgacgcgcgaaacctgcgagcagcgcgtccgagttcttgttgagcaacgccgtcatctcctgcggcttgcgcaccatgagcatggtcacgatcttctcgaagtagccggccagtctagggtctagcggcgtgggctggaagagaaaccctaatagggtttccacaatggcgccgtcgctggcggtcacgatggtctccgtgatgctcgtgatgtcgcagcaaatgacctcgcacgccatgtacgggtacttgagcgtgcgcaggtcgtccgacgggtcatcggggctctccacgacgtactccacgagcttgagcagcacgggctcctgtgataggctggaggtttagagacaccatttaaaaagttagagaatgtcgtaacgtaaaataacgctttaggtaggcggatgcaaaatgcaatggcaaatgcacgctataagggaaaataagaaaaaaaataaaacaaaaaatgatgcgttttgcccgtacaagtcgatgagcttggtgttgcgcgtcttgacctcctgcaccagctcgtcctcctgcagcacctcctccagcgtgaagccgtccttctccagcaggtcgttgagcgggctcgagatgttaaagagcgacgagccctgcgcccagacgctgccctcgtccgccatggcggagaacagcgacatgctgaatggcgagaattctctaaacctctcggttaaggtaggtagaccccctctctccaaacgacgaaggggggagcgcacacttcgctccgcttggttgtgggccggaggtttcttcttccctggtgccgccgccaccaccttcccccccctttcgacccgtttttgtgataagtcctccacgcaataccatttcggttatcattatagtaagcgcaggttagttatagataataagcacacaggtgtgcagcggaaaagtccccgcaacaatgcggttaggtgcgatttccgccccgctaattggtagaaacgctgtcgagctttttttgttggctcggggcgctaatattggcgcgtgatatccggacggggctagcgctgttgcgatgtgctgacgcgtggtgacaggcacccagtgctgagagaataagcaggcagcgtctttggggctttgccttggctggcgcggctctattgtagcgtggcggcggatctcatttttgaaggttgggtggcgctagtcgtgccacgtcgtcgggccacctgctggtcgaagccacattccgaccaccaatcgagcacctcaatttcggcgaggcgacccgcattggctaatatcagacgcttctgcatcgtctggattggtcaaaacggccacggcttggattggcttgtcatgttgaagttgctctatccataaatgacattttaccttaagcacctcccaccgttctacaaagtcaatgttttgcatctttaaaactggaaggagaagtccgctcctgaggaaaccgagacgcaaattagttagacaaccgactcacaagttttccgacaacagcaatacttgccaaaatggaggagctcgtatttcagcaaaagcagcagcgcaacgaagagatgaacttggaccggacacgactgcgtctccagcacgaaagcgagttaaacgagttctgcgctcaggaacaggaacgaggccactttcatgagtgcaaacgccacgagattcgtgatcgtcgccactgtccagtccgtatcatcgtgcggatagaaggcggcgttgggaagttggcttaggatcaactggtacacgataaacacgagcgggaccacgcactcgacgtattggaccaacgtgagatattcgcagtgaaacagtagctgcagtccttgaagtgcgagtttcttggacttgtcccccacgatccgcttgacgttgagtctttcgatatggttctgaggctcggatatcggggcaacggctatgcgtagtagcaggcgtggctggagatactgccggtttgcccgccgggatatggagttcgtggattggtcggttaaatcgtacacgccggatgattccagcttttcaagccgacgtgcttgctcctgggtgatcgagtgaggaaggcacgaccagaggcgaacgccttgtagcgagttgacgcggtaggttttcgggcttcggactactgcgataatcatggatagaagctcggtaatatccagcatacttgtcagtctcttcgtatgaatacgagctaacgagttgcgtcggtcgcgaagaagttcccttacgacttttgcattagcgcgagcgtcgcgatactccaagaaccactggcacatgtgtagtaaaataaaaattccagaaaggtagagcgatcgagatgtgtacatgcacacggagacaaacagcgccgaaaaagtcgacagagaatgcaacaaactgcgggacgcagtcctcaagctccctggtggaacgcaccacgaagctctcagcggcaaatttccagaatggtaagacaataaccacaatactatggtaagcaactggaaccagactgtagagcaccttgtagatggggtaaacccctattagcgtcatgtgagcgaagaaaaaccggttgattcgatctcctgctgctttaaatgaggagttccttgcaaacaatccaggtcccaggatgaaccgaatcattaacggcatatagattccaatcggaagaaccccaaatcgcatcatgaagggaacggggaattctacggtcgctgcagcgaggacgcaggtcgcgatatacgcagcactcccgagaaaagccgccaaaaatcgtttgaatggtgtaaagttgatgccaggaacaaaagtgttggtttgagagtttccaccaaagcccaacatcgtctgcatcagtagtagacgaagccagaagacccaattggcagcccaaccttcagacggatggcgaagtggtagacattccaatagcactgccgctgttagtgccggcgatggggtaagtaaacacactagaaccactcggacccgagacgtagttttgcagtagatatccagactctccagccgttcgacggagtaagaaccctggcgacctacttagtacttgaatttcgttccatttcgcctcgagtcgcttccacagcggggcttttggtttattctccatgttctgttgtagttgcgctgtccacatcaacgactttaacctcttgcagagtttgtgaaggtaatgtcgccaaaaatactgcatccacatcactaagtttatcgactcaagattagttcgtacatgatgaaatgcagatgccgttagcatgggcatcgcaaagatattgccatcttcagaagatctgtaacagagaatattgcttaggtattgcttagctaatatatttgacttctccttactaactaaacatcttcgtctatcgtagcgatgagctcgactgtttattcgttgccgcgaagccacttgaagcggaacgtgaaatcggcccctaaagtatgagaaggcaacaggttaaatagctatagcagcaagtaaagctatagcaatcaaggactcacctaagtgttcaagctgatactgaagcaggaaaatcgtctccaagaacagattggcttgcaccgggtaaacttgcgtctcgagcacaaacgcaagttggtagagcggggaaaaggcaaacttgtgctgcaggataaagtgcagaagaaacagcgagccaatttccagcgcggcaaacaccagtagattcaccaccgctgtcatgccccaattgccagctccccctgggtagtacaccacattcgggagctgctcgagcaccgatttgtaaatgacaaaaatgagcggaacgacgcattcaatgtactccactagcgccaggtactcgcagtgaaacagcagctgcagaccctgcaagaccaagtctttggatcgattggcctgtctggggcctctgctggtgcctagagccttgaaaatgttcgtagttgttccctttgtatggattcctgatgctgttaccagtgtaatctgcgtgttccgtggggctggagcaaccgacactcgtttgtaatcccatggcgttgggcgcttacgaggcgatttcttggatgacacagctgcctctctgttggatggcagcccctttgagccgtaaacgcccgacgcacccagactttgcatcctgttgtcgagcggttctggaagaatattgcgcggattggaccacagacgtgcaccatctaacgtcgtcacttggtaggcgctgggattcctagccacatcgagaattatcttcaaaatgccagagtcttcataaactttgctgctatgagttccaccgttcttgtttcgaaggcgctgcttagtacttcttcggttatccaaaagttgcaacaatgtcagcgcattgttgcgaacttcgcgacattcaagcagagactgaccaacgtctgctgcgatgaacagaccggaaaggtagatcgagcctgacgtcgacatgcacacggagaggaatagtgcactgaaaaagtccacagaaaaggccaccagctctggcatgaagtcctccagatctcgcgttgcgtgcacaacaaaccgcttcgccccgaatttccacattggaagtacaagaagcaccacaccgcgataggatggatgaattaggtcgtaaagtgctttgtacaatgggtagattcccgtgagagccaagtggacgaaaaaggatctctgaaatctctcgtgatgcagccaaagcagcgagccctttctgaatagttcagcgccaaaagctagtcgggtcatagctggagcgtacactgccattgtgatcgccccgagttgccacatgaacggcactgggaatccaaagacggcgccctcgaggaggtacgttccggactgtaagacacagatccccaaagctgcgatggtcatcttgcgtatagagagatcgtagcctggaatgaaggcgttcatctgagagaatcccgccacacttagaatgaacaccattgcgctcaaacgaatccaaaacatccaattggctgcccacccctctgacggaggtcgcagtggtaagcattccaatagcagagctactgtcaataccgggaggggggtcaggacacaaatcagaaagacacgggtcttcgacgtcgtcttgcagtagtgttccagcagctcaagacgttcgatagagtatgaaccttgacgacccacttggattctatcccagaactcctctagacacctcagcctacgccatacaatagtttgatgagcggcagctttcacctcatcctgcttttccattgcaacgcggcgcctcgtccttttaaaaactgcttgctagctttgacaaagactttaaaagtggaatgctattcagagcctcgtaagaactagacgagaagaacgagacatgttcgactatttataaggatccattaccaaaagaagtgttatttttttttacttaatactataagttggtcggttgcccgcctacttgtcgtgcagccacttgaactcaagactgaagtcagcgccgagatgcgcgagttcatactgcagcagaatgatcagagcaacaaagaggtgcacttggactgcgcacatttggttctcgagcacgaatgcgagttgatggatcggcgagaatgagaacttgttccttaggaaaacgttcaacaagatgaatgatcccacttcaagcagcgcgaacaccaccagattcgcgactgaagcagtcccccaattcccatcgttattcgggtagtagatgaagttcggtaagtgtcgaaggatcaattcgtacgccacaaataccagcggaacgacgcattcgacgtactcgaccagtgcgagatactcacagtgaaaaagcaactgcagtccttgtagtgcaagtctcttagctctttcagctcgtctcaagttcgagttgtagtcgtccgctgttagggactgaatatacgtcacctcgatcatatcggacataggagcagcatttaaggcggactgactcggagttgggaggacggacacgggtcggaagagactaggctggaatgggcgtcgacccgccatcctctgggtcattcgtcgggtagtgagcacgtctgtttgatcgtacagccccaaagcgtccaggtttcgaagagtttccagttgttcgtgggttagatgatgcgggagacacgaccacagtctcgcatcgtgcagcgacttcacttcaaacgccttggggtttcgagttactgcaattaccatggccagtaattcggttgtggcaatgttgcttggtcgtcgattgttctcgcaggggtgacggtgctgagacgcacgccgatcttggagcaattccaacacaacttttgcatttgcatgaatttcacggaattccagaagcgattgccccacgtctgcgaggataaagagcgcagacagatagaaggacccggacgagtacatacacaccgagacgaacagtgtaccgaagaaatcgaccgagaacgccaccaattccggcataaagtccagcaactttcgcgttgaggtcaccacgaagtgcttagccgcaaacttccagagtggcagcactaacactacgacactccggtaactcatcggaacgtggttgtacagcaccttgtagagcgggtagatggcgatgagggtcatgtgggagaagaagaagcggtggaacacgtccgagtcgtatttaaagggcgagtccttcgccatgagaacgggtccaagcacaattcgcgtcatcaacggcgtgtagatggagatcggaatgactccgaactgcatcatgagcggcacggggaagccaatcgtacttgccgcgagcatacacgtcccgacgtagccgacactcgtgcctaccgctatcgccaatctctttgtgatagtaaagtttagaccaggaacgaaagcgttcagttgcgagttccctgcaaagcccaatatcaactccatcagcagtaagcggacccagaacacccaattcgcagcccacccctcagacggagaccgtaagggtaatgcttccagcaagagagcagccgctagtgctggaactggcgttaggaggcacaccaagagtactcgagctgtggatgcggttctgcagtagtggcccaagctttcgagccgctcgacggagtaggagccctggtggcctacttgcagcgcgttccactttttctccaggcgatcccagctcataactcgtgaacttggctgcgtgatgcctggtataccggagctggtcggagcattgctcacctcgtcacttttcattgctctcggtcttgaagtgcgtcacgacgaagttgtcccacttggaaagcgaatgcaaatttagagacggggaagcacgaaacggagaactatacttctttccctgaaataacgccaaataacattttatttcagccaatcatatgcgagatcagccaaaaataatattaaccactaagcatcgaggaatcctgaatgggagttccggctctcagtcgtagaaattggtcggaaatggagggcggtgacggtccaccgaagggcaagtgccctacgtgccctaagctcgtggcgaagtcgaacatggccaagcaccgcatagtgtgcttccatcgcgccgatttaaaagtgaacacgtggcgagaagccgaccaggtcgtactttattgtacacacacatcgtaccttttggtatgaagtcgtatgttttagtatgaactcgtacattttcgtatggactcgtactgttcggtattaactcgtagattctggtatgaactcgtactttttggtatgatcccacttcaacttcaccatagtcctcagaaaaaatcaaatctaaaattctccagaaaatttgtcgactaccttaaattttgtcgactgccttgtattacccaaggtggtcgatcattggccaattaacacagaataactgccaaatgttgtttcagcaaaaagaagttgcttccgatgacgagcccatacaaagtcctaatacagagattcgacttcctcggaccgaaacaacgtcttaaggctgtctgcgattcggccgcccactgatatatattctgattttacgcttaaaagtcactaaatcaggacgtagatagtagttttaacgatagttgtaagaacgcacagtatcgtacttcagtacgacacataaatacgttattcaaaatttaggtattacacataaacgcatcacattaaaatgctcatgtttagtctgaagtcaaattggccagtcagtgctgcagccaggctaaattgtgagcaacgcaaactctttagctgcatcaaacattcagagcgcggaccccccgtatgaatccgtttagcgcgcccaatagacccagtgaacttgtcacccgtgcactggcaatcgaatacgcctaaatatcgaaaaaaggatgatgttagtagtattgctactacccgaccggcgcctatccgacttcgaatacatgtgattagcgtaggaagtagaatgtattaaatgttgagtagaaagtaagatagtggatgcttcctacgtgtgctccatgctttagtcttcctctgcctctgctttgatgaaatcacgatcaaccttgcggcgcttgcgctgcctgtacttcttaatctctgcggagggaaggttgccggccgactcccatgtaggctcctaactcgtgaaggaacgcaacccttcctttgatgcgccggtcgtccggtatagtccgcatctggtatatcgtcgtccttgtaggtcggtcccagtgggtaggacccattccgcctccgctgcgtcgtcgccctgctgcgcagtttcaataagtagggcttgcagggcttggatagcaagatcaacaggcgcttgattgcgtctccagtactcgaggcgtggttacggataacgcccacgacctcaagtaccgggcggctgtctcatccagcctgccccgttaaggtacgccgaaatcctcctccgtaacagcagtcgtagtcggtctccatgcgagctgacggtagagctcgtgtcactgttccatgtcctgggtcgtcgcttcttggacctgccatgagaatagtcatcaagctgtaacataggtcacgttttgaccgtccaacacttgctaaaacagcatcctcgacgtacctgcccctccgactttcgtttgatgaggatctcgccatttttccgcacttcgtcgcgtagttgatccggattcgccccaggcaggaatggaactaactcctgtgcctggtattggcgcatttccttgagcgtcccatcggccgtcccttccagaagctgtgtcattttgccgttccagaactagcagcacaccttgctcgggcatttcaacagtcacatagacgcccagtttgacctcgctcacggcattgactatcttaccaagttcagagcagcagtttaccagttggtcgcccagggtccccgcgttagcgataacgccagccgccatggagtacgtctctcgcatgaggtccaccagcaacttccctcgctctttttcaccttcggcttcagcacgtgattggagcaggtcttgctgaatcttgccgacggtgacatcgtgctgaatcgttgcctgactagccgccgtctccaacgcacttacttgtccattgacccggtccagtttagcggtgagtcgagcggcttccttttcactgtatgcgagcttctcttcagctacgagagcgagcttcgtcatggtgtccagatggtcctgaagcgatttcgcgtgttctcgtgcgcacttctcggatgcctcggccttctccttcgcctcttgtagcagttggacaactagcttctcttgtccttcagtcctcgtgataatagcttgtaacgcctcgatgcacttgctcgttttgccttcggcagtgctctaccttctgctccgcttttcgcaaagcgtgcttcaggcgatcgcggtcccgctggagttgctcgacgttcatagttcctacttcggcttgctccgcgcgtgctggcttggtgagaatcagatgtgtggtcgtcagggtggagggggtagatctggcattattttccccttccccttgaacaaaaaagtaacccgagctcttcagcttgtcctcaccgccgacatttacactaattagttgacctctgcttttgaaaacaagtaggcatgtcggaggtgcatgtcagagaaaatgcccaatgatagcaataggatttgataccagtctgattttgcctcccacatacaaacttgtaaatgtcactacgtcggaggatctgacgagcgaacatggtcacaagctgtgggaaatgacgggttaatttaaaaaaacttgaacgcgttggggggggataccagtgtcgaggcgcgacattggcagatcacaattgggctcttaagcgtgtggttgccacacgcgacggagaagatgatcactggctggaatcacgaaggctctgcttcctgctctattgcgaaggacaacatgtatttaggtttagtgtagttatcttggttgctgcattgctcctgatacactgactgttggtgagcggttgtttggctggaggttcccactgactcgagaacttgacacctgcagtgcaagtgggaaccttagccagattactgttgtgcctgtcgtggcgttctgcctcagcactcacgtgtttcaacctctacctctatcagttcaactagcgctatgactataactctacgcagtaacggtgatgtggattctaacacctctcaggtggtgcttgaggaggagggcggagataattgggaaataactagcaagtagggcaggaggcatacgtgtatgtttttatttttaggtttttacggtagtttcgctataacggaagggaagtgcaacatggcttcattttagttaagccacacaacaactaacattagtcagtgctcagtgcatgcccggtggaacagggtcgaccagcaggaacgcgggaaccgctggcacacgacttgccgcgcttcctaggtacggaaccgttaaccaggacccgctttccgtccagaccgggtaatacgtgatctacagggtgaagataacatgaatgcagacggtgaacttgaagttgcacttgcatccccagcttagccgcccaacgtccacatgccagcaactctcgggttgtccttcttgttcctttcgcacatagttggctcccatctgggccgaaaccggcgccacctcgcgacttcggcccaattcgggtagatacaaacaacgacaccttgcggtagtacgcgaaccacattctgtgtcggagatgacacgatgggattggagatttttccggatcccccgagctgcacccgtgattgattggttccgaagcttactctgggggagggaggcagcgacacatggcgtatgggagaagcagatcctggccggactcgtgtttgcagtgtacaaggtttggtgaccccggatggagatgtccccaagggaggaccccggctagagccaaataccgaacgagaggcaaagcccaagggagcgtaaacgtgcctccgactggagaccaccttctcttggtgcactgtacaacgcaagaggagcccggccggatcaagcgaagacccagaaaacgtggacttgcccaaggtatcccagatgtggagcccaagtggagtgtcatctcgtttggagataatcatgaatcccggatggagataatccagatgtgaagatccactatacaaaaaaagatgtttccgaccgaccaagctgaccagccaggatctgttcagattccgtgagcattgaacttcgcctgggtacctagtgctgattatatttgctggaagtatgctacgagggaccgcggacgattgcgacgacaagactatagtgaagataagtcaagatggagagcatgtaaagatcgacagaagatagccagagagagagagagagagagagagagagagagaacagacaaaacagaattcgttttgccagcccggtgtcaagtcgctttgtagctgcctggggaagcgcgccccgtaagaggaagctaagagaccaagccggaccgcgttgcggcgagtgactgcgagcgtatgcagccggggttgagcccggtgggagcgtagactctcggggtcacgcccgggagcgcatcaaggaagcaagcccgggtgggacatcgttgccgtgagggttccagtaggcgtgcaggctcgtcgtggcgccgacgccgtatctaaacgcgtgggtaagataactctccccttacgaaaagaagggttcgtgctaccccgtcggcgatagctaccatggaactgcctaccggatatagacgtacccggaggaccatggagcatcaagtctgagagagattaacccgtggtgagcagctaccttggatgttacctgcaagaagaacgatgcttgtggtgaatgtcgcgcccggacggaaatagtttaagttactttggggttcctcaccggaaggaccatgcccgggggatcaaggaacggttgcgatgcgaaacctggacgtacgggggaaacacgacccataaaacccagaaaaactggaagacaattggataaataagtcctaaataaagcgttcgtgttgtcaaggatcgcgcaagtgagttggagtcgcctacaggacgtgcattccctgaggaccgattaagtctacgtgtgagggccctgcaactgtgacatctgggtcgagctcccacaaccaagtccagtccaagttggggtgagtaccgggcaccaacccaaggttgatccatcccatttcatttcctagttgcggttgagctcgtccaggccaggaggtcccgcatttcatagtactgattacctttcaatccggtgaggcgaggctggtgaacgcctttatcgtccagggtgtatagtacgtgcccagtggttgggtaaagtccaaacggaaaacccaagtgggggtcagtctccaattgtaatacaagtatcccgaccagagttggcgtgtgaccttgtgcaatccctctcggtagcgtttatcttcggaaagtccggagtatcaccacctgagttgctttcacaatatcaatcagatactgaataatacaaatcgcccacgttcgttcccaaacggagtcagtacggctggggggtcagcctgttagtggtgtcgtccccaaacaccaatcaatacaaacagagagttgtacacgatatacagtcgctcttattctttcggacccttaacccaccggcgaccgctcttatcccgattttgcagggataagattaatatagaaatttgtatactggtgggatagggtaagcgaggtccccagcggcctgccccgactcttcgggttccaccggctgtcaatctcattggccagagttatccaatcaaagcttggatacggccgtaatattaagctctgtcgagatttcgatcgaaaaaaccttggcgtaattcgcaagataatgcgaacattcgctaagtgggtgaattgttctgagctgaatatcgcggttgatggacgtgctcggcaatcgctgtgacactatcccagggcaagcacggcacgacacatgagggacgccttctactgcaacgacgagacgtacgagacacaaccgaaagcagaacaactcaatctcggtacgctgctcactctagccagcctgttaccccattgctgacgtgtttctcgactgcaggcgaggcgagcgctggcggcacaagccccccattccatcggcagtacacccgcctgacttcctccatcctcttcgccatgcagggcttcggctactcgcagtaccagacgcactcgccgcaccaccagcgcagcggcgaacttcccaagctctactacaaatccctggaccacggcaccgatagcggcggcttcaatggcccggcgtgcatgaactccagcagcacgtgtacccgaacagcatgcaggcccagcaccaggcccgacgccgcagcagggggacttcgactacgagcccattagcacccaggcaaatactacgcgctgtcgcccaaggcctatcgatacaactggggcggctctcagagccgctctgttgggctgcagtcatacgtcagcccacacggacaaacgtaatcgtgaggcgccctaaatgaagcagatgaagcgcgtgttcaagctaaacgatggcatcaaccatcacaagacgctgcaggatgaggccggacgatcaagcagtccatcgtgtgatctcgaatcagagtgcggagcgcgcctaaaagcaggcggaccgccgaggaccaaaatggtggtggctaaggcggtggcgtcagcgatgagggctataatacccaatggtgctgccaaaacaggctctcactgcaacagcagcctttgcaggcggatgcagtgagtatgtgttttagtgtaaaggtctagtataaaataaaataaaggcattccatagaattgagcgacagtcaaaatcaacctgtcaaaagtcgcggtcgctcctcagtggtacagtacacatcgtgtggggggagatcttctccgagaagatcatggccgacgcaagtacgacacggcggccgacagcagcagcactctgggcggcagcagcagcgatgacgacgagcgctcgaaccaacaggagctcacagcgcgagggtgctccgagagccaagggcagctcagcgatcaagataccgacttcgaccgctcctcctactttgttctctcggaccctaactacacctacgaggctgtcccggtgcgcatctatgtcgtacttgtggtggctatttgatatttaaccgtcctgcttgaatacaacaggctttcacgccggatgtcaaccgaacagcgtcaaacaacaagaaaattcatggcaagccgatgtctgtaggggaggtacgtgcacgtatctttggtgtttcagtgggcgtcacgatggctgaattccgatgaatgcctagacgttggagagatttcaatggcaccaggggttccttgactttcacaccctccagccagtacgcaaaccttcacgcgaccgggcgggtatgcgaattacttgagttctgtggcgtagtctaacaaatgttattatgcaacaggtttacgagcctagattcaggtctaccaaccatgtagacgcatttctagccgcccttccgctcttcgagatgtatgcgcagtttcagaatgacgaagactcgactcacatctacgcgtggttgcaagcgtccctgaaagcctcgaaggtatttcacgcgttctgtggtgccaggtgtactcccaacgctaacgtgccattgacctctgtgtagataacgctatgataaagcgtcgacagcgcctgtgcgagtgggatattgagcgcttagacgcttttctcgattcccatgttgaacaccatatcgccatggaagcagatgaatcgtacgacgagaatgctatccgggagcataccaaggaggggtttttcaaagagctcgagtataaagcttgagtccaagaagccgctgcgctcgagtggcttgctgtctggacgtatcaaaccgaggtgatgtttcctcgtcttggggtatcgttgagattctagtacgtcagaaagagctcagcccagcttcacagaagcatacatattttgttagtgatgctgagatgtaatgaagaagcccatgcctacatatattccgtcatcgctttcttattgtagcatagatctcaacgttgacaaccagcttgaccgccgtcgagccaaagctggcttcgctctctcttacaggcgtattttggcaagatcgacttcgcagtgaaatattgactcccacctaattatccgactcattctgctgctcggccccgctgagcgtacattccaccgcgccgagcagctccgccagcacttccgcaacggcctcccgctcgctctcatccgggggcctctcagtggcagttactccttcttcatcctgtcctgctgcatctgcgcctggccgctctggctggtgcacttgtaccactacgtttcgcgtgacacttggaaccggtaactgcgaagatgacaccgaagcagccccatcggcattctgaacatcggtctcgtattgccttggcggtacagcatccgaggaagctgtgtccatcgtttccgcgcgtaactcctcctccttcgaccgacgcattcggatccgtccgaccttttcagagtgcggaagttgatctccgttcttccatttcgagtgccaaatgttaaagcacgatacagaattaccatcggatacgtgtcgcgccttggaacacaaaaacagtcttcctcgatcagtggagcactgcttgcagtaatgacgcgttgtgccgggaggtcgattcgatccaggactgccagcaccacgcagtactgaacaaactttgcacacgcgaaacttgaacttgcccttcgctgtcttgtccgtcgacaccatcatttgatgcttcgagctagctagcgagtacgccgtcgaaactggtgtctggttagatcttggctccacctcggtaacagcggcttcggcgactggcaccgtgtccaggaagtcatcatctccgagagcgagtagctcctcgtgtagctgaatgagaaaatccgcgtgtgaaagaggttttccccccaccgacttcgcgtactcacggtgggtgataaaagcgttaataacagctatgtcgagaagcccgtagaaaacagtcttgtagtatttcttcggtcgcatgactctttggatggagtacccagtcaaaagcattttcagcgtaagggatgggcggcagaaccgcaacagagcaacacgtacctttgcaggcgtaactggtcgtgactgtcaacaccccatgtacttgttgtacaataccacaaactccggacacgaaatgtttgcctgtgagtcgtccttttgcttcttccgcacaatcgcacgtctagcggaggccccagacgccacaaagtagcaaattttcgagtcaacccaccgcgttgagtgcatttgacgattcgtattgttccgaggaagaatgtatgagccgcgcggcatccctctcgaagctgtttttgtcggtcttcaagtcttcggggaagccaagacgcgtcgtacaaaccgtcccgatattgtagtaccccatgtccatcaaacaaaaccccaacgtcaccgaagaatactcgcgatcagtgatgatgattcgcttcttggatcgatccacccgacgctgttcccacaaggctttaaggtttcgaatcacagcagctggtccacttctggtgtcaacaaatggactgttttgtttcttaccgcaataaacctcgaacctgagcatgaatccacagcgttcagataccgactttataaaatagcgcaaatgagcatacctggagcagaagtgggttttcccgcaacacacagcgaacagcttggtgccgtacttgtgcggcttattcttcaggaaaattcgtattttgttccgcgaacttcttggagggataaccatctcgtcgaatgcaacccagcgccctagttccattccacccttgaaagtagtctgtaacttgtttatcacgttgcgaatcttccatgcccggtccggcttagcctgtggagcctggttgttcgtaaagtggagaaatctggcgaaggacgtgttagtgggccctttattaaaataacatggaagtcccagtacctgctaatctccttgaaacgcttgcgaactataaatggcgaccaagttccagctgggatcgctccacggactcgtgtattccaatgatcttccagtcgagactttatcgggcaaatagccctggatattactagggccagaaaatgcatgatctccgcggcaagtacgtctttgaacgcgtccagctcctttttctttgcttgaaacatttccttgcgtttgtggatgtcgttcatcttcttttcaatggacaacttcgcctgtcgaagtctttccggtcgtgtctgacgctcgtaacgattagtttcctcggcaatctccgttcagagagtcttcggcatgtagtaaaataaagatcagaaggtttcatcgttttcgctgcctctatagccgaggcggtaagttgaggagggtccgtaaacacatccgtagtgccggacaggtccgagtcatcccgttcgtcggttaccggtagcaactcgcaaccattgtcagacatgcctcgaagcaattcatctatatgtagtcctgggggccggcaaccgcgcgaatttcctcttctgtttcgacactaaaactttcgtttccggtatcacccgcaatataaagcccatctgcaaactcatcttcagaatcgtcgtcggcactctcgccagaacagccatccgattccagcacctcgtgatcgtcatcaatacccatgttcacttcatcaacaagcatctccgcacgtcttttcgattcttcccaaatactcgactcccgggagacgaaagagtacgtcgattttgcgagggtgttgcggttgtttctgctgtctgccgaggcgattttctttttctgggagccttgcctgcccctctggaatctgctagcattactggcgtagcaaccgcatccgcattgtttgagatcccgtcaccccaaggctcaacaccaccacctgcatttgagatcgcctcttccttggtagtctcgggaaagtaatccgggtaatcgtactcgtagtcattttcggttcgatcatcggtttgccggcactcggtagccacattgtcagcatcattggttactcccactccattattttctggaatcgatgctctgcttgcttggcgagctgtagatccaccgctgtgtttctcgttctcatcggtatctttccgagggctgtcatggcctaccgtcccggtagcttcggtgacttcagctggagctggattttcgagcatagcttgacgtgctgctttctggcgacgcctaaacttctccaatttgtcagggcagttcagattggaggcaggctcccagctcgtttgggaatattcctaccatttcacctcaaagtaagacaagccaaaacgaaaagtttcacgaagaattttttccacttcgtacacttcctccgaacctgggcaccattattacagttagtaaattttttcccaaaaccaacgtaagagcatgtgacaaacacgtgctgcttgttaccttcagaaccctcttgttttgcgaggattttagccgtcacgtggctacctcggtcaggcaagtccgctttttgggttgttttttttctacaacgcgcgtgcctcttgaagttgtgctgccttgaacttgttgaggagctcagggcaatgcagattcgattccggctcccacgacgtctcgacgtaacccttccatttcacatggtacttgggctctccacgcacgaacttcatctcgatgatcttctcgacttcaaactcgtcgtctgcggcattatgaacgtctactataagatcgctacgacgctttgctagtgaaagatgcgttttgcttaccagatgcctcggagttcactgtcctcgctgcttttcttcgcgccttccggggcggctgggcgtcgcgcccgctgcctactcggcgcttctgtgccatctcgacgagtgacagtggagggggggggggcaaaaggcgcacttcttgcatccggatacgtgggcattgttgaccttgatcatgcaactatactgatattaaatttcgaatctaaacacatccggatacgaagcacgggagagcagatcgtatacttgtaatatctcgatgttgagttgcaagtgccaatgttgacatcgcaggtgaattgcttagcagattcttctggcaataacaaatagactggtactgctagatgttctaaactgcttctagagctcctcaacattgtttcacagtgataaatacacgctcggcgtcgcgctcaccgtgcacgtaacccgctacatggcaacgggcatcacgaccgagctcgcgagaagcgaaacgacgggcatgacgaccgcacacccacccacgtgcatgtaaagaagagggattcaacgttgggctggggaatgtcaacattgccatcgtgagtcgctggaactccagatcagcgaggcatcgaagctcaccagaaaacttgacggcaagcatagcggcacccggagcagcgactgctgtacggcgagtatagctgcggcaagcatagtggcggcgtaggcgacagatgaacagcgagcatggcggcggccggcacagggagcgtagcacgacgggcattgcggcggccggcacagcgacagcagcatggcgagatagtgagcatggcggcggccggcacagcgagcgcagaatgacgaacccgtagcacaggcgatcgtcgggcagcattccggtgagcccggcctcagcgttacggcgagcggagcggtagcggcccagcgagcgtagcacgacgagcatggcggcggccggcatgggcgacagcagcacggcgagcatagcgccggccagagtaaggatcagcagtatggcgagcttggtggcggccttggcggcgacggtcgatgcgagccgggcgacggcatagttggggaagcgcgctggagcagtagctggcgatttcggaaatgaggtttgggattgagcgcgcggaaacgatcttctggcacggatcgcagcgcgagcgtgattggccgcgaaatggctgaccaattacacgtcgcaaattcaaacgatgggggcgctgattggcgtagataccggagcgaacccacgggcgaaaatctgcgtgttgcgcgaactcaaagcgcaagttggaaaagcgcgcgaaaggctgtgtgttgcgcgaagcttgatggctgaagccaggctgataccacttcgtgtgacctttggattgagccaatgctgattggcttattagcttcagcttcaacactcgataagcactccgaattatagtagttcttgatttagtgactacctagtacgagggcatttcttttgcagttctatagtaacttacttttgcaagttcttctgcaacagaaatgatggcaaacggtgcctgaacgtcgctcgcctcgctacctaggccagtgtggtgttctcacaaaacgcggtacccgtagatatgaaataccaaccaatgcgtgcacacggtttctacagttgagcgctagcaccattgatcttgtccgtcgaaaaagctctgcttctgggtgaccaaaagctcacgagacagcacacttattccctcctgttcctcgacaacactgatacgaatagacgccagtgacttcagtgaggaatacgccgcgctggctaagaacacggatggttgatgaacccccacccctcctttattttactgcaatttactacatataggagcccacacaacgcttgacctcccgtgccgcgccaccgtgctaccggctgggaggcagcgatgcacggtggtgcggcacttgtggctcggccggccaagacaccactgacacctccatgcagctcccgaagctcccgggagcaccactgccaacggacgcgaattaccctcgactttcgccataccaccgataccagccaccctcagcccgcagaacgcacctcaccgggcgaggcggcgagccgcggtggcgcggcactagtggttcggccagccaagtcaccagtgacacctccatgcagcccccaaagctccctggagcgccattgccaacggacgcgaattaccctcgactttcgccataccaccgataccagccaccctcagcccgcagaacgcatctcaccgggcgaggcggcgagccgcggtggcgcggcacgggaggtcaagcgctgtgtgggctcctatatgtagtaaattgcagtaaaataaaggagggggggttcatcaaccatccgtgttcttagccagcgcggcgtattcctcgctgaagtcactggcgtctattcgtatcagtgttgtcgaggaacaggagggaataagtgtgctgtctcgtgagcttttggtcacccagaagcagagctttttcgacggacaagatcaatggtgctagcgctcaactgtagaaaccgtgtgcacgcattggttggtatttcatatctacgggtaccgcgttttgtgagaacaccacactggcctaggtagcgaggcgagcgacgttcaggcaccgtttgccatcatttctgttgcagaagaacttgcaaaagtaagttactatagaactgcaaaagaaatgccctcgtactaggtagtcactaaatcaagaactactataattcggagtgcttatcgagtgttgagctgaagctaataagccaatcagcattggctcaatccaaaggtcacacgaagtggtatcagcctggcttcagccatcaagcttcgcgcaacacacagcctttcgcgcgcttttccaacttgcgctttgagttcgcgcaacacgcagattttcgcccgtgggttcgctccggtatctacgccaatcagcgcccccatcgtttgaatttgcgacgtgtaattggtcagccatttcgcggccaatcacgctcgcgctgcgatccgtgccagaagatcgtttccgcgcgctcaatcccaaacctcatttccgaaatcgccagctactgctccagcgcgcttccccaactatgccgtcgcccggctcgcatcgaccgtcgccgccaaggccgccaccaagctcgccatactgctgatccttactctggccggcgctatgctcgccgtgctgctgtcgcccatgccggccgccgccatgctcgtcgtgctacgctcgctgtggcgccgccgccatgctcgtcatgctgctctcgctgtccccgctaccgctacgctcgccgtgacgctgtggccgggctcgccgatatgctggccgacggtcgcccacgccgctgatatcgtccaggagcgcaactggtccggccaagatgtcgacgttgactatcccaggtcaatgttgacttatgttatgtgtgttcacacatggtcggtgatatggtgtggtcaacatcagaaggagcggaatcttggaggttcgacgacatccgacgtgtgagaaatggagttcaaagcccgacaaatcgttgacgactaccgggcgtattgggagcactgccgcgcgtatatgcagtacccgcctcggctcttcgtgatcatgagaggcctcccaggcagtggcaatacaacgtttgctcaagaggtcgctcgttatgcagcaacggttgatttccgcgcatcgatttgctcagctgacctcttcttccagcgcggaggatcctatgtgttcgacgcgagtcggctttgggaggcgcatcgaagctgctacgaacaatgcagagaactcctgtggcgcagccccgaccgtggcgtggatatcgttatcgtcgacaactgcaaccttcggatggatgattttgagcgctataaggatctgcacattccctcggacaagcttacgtttgctgcgttcgaatgccccctggcatagcggaagcaacacagctcttggaacgagctaatcgtgttggccacgctatccctggtcgcactttcgtggagtacttcaacatttggagacacaacgcaccggaggagccgcgccccgacaacgaggtggacaccgtcgatgagctgcacatcgataacgagctgaccaccgtcaatataccgcgcgcctacatcatcacgctggaagagtttatacgtgatcgctaacgtgctccggcaatgccgaagaggtgactggtagcttcagtaaatctctaatttgacgtatccactcttgtgttggcgcttatctcaccacatatgcatctttttgtaaagacaaccatgtgcatctactcgtacatctctcattgagtcaccaagtcgactacgacttggaacgtgtctacgctggcttagacacttgttactgaagccagctcaacaacgatttataccaagtcaacgttgacttacagtcctcttgattctaaatcgaattggtccacatcaatttatttcaactataggatttgcggtatcactttctcaaagaaccttgactgcagcgaagtgctgatggcgaagcgatcccaggctgcagcgagcgagggaactgctggcggtaggcgcccatgacgaggagcaagaaaactgcaaaggcgacggacaagccagcgacaaagcggacgagcgcgcccactgacaagtcagcaaatgctgccaagaccacgcctgccaccggcaatgccaagcagaagcggaagaagggggaggggccagacacttcgccagacacttcgccatgcccccgtaagcagaggaagactgccaagaagactggcgaaggatccaacgggacgacgcgcgagttggtcgccgcgagtgcatcggaggacgaggcgacgactcgcgatgaagagacgactcccctggtacccaagcacgcgctccggtccacgtgcttggctctacaaaagaagatcgcagacgaaaagggcgagcaccggcaaggcccacggcgcaaggcaggtgattactacaagatggcagactaccagaagcgtgtgtgggcggagaaatacacagctgctaggaacagcgacaacgacttggactacgaggctttgagcaagttgactcaattcaaggcgttcaaaaacaacccggaagagctccagcttcacgagcctgcgctgctgaaagagttctacgaggtttacttagcggaccaagccctgaaagcagacgcacacgcgcagaccgctggatcgggttcgtcgaagctatcgcaacgtggcggagccgagcacctggcgatcgagcaatgcgacatccaggcggctcagcagcttaccgcagccacaaaccaagcatcgctagcgtcagaccaagctccagggcctccaatctcgcagacacccgtggtcgtgcaggaggaaggtgccccagctcggagcctgcaaacccaccctttgcgaggggagtatgcgaattttgaactttctagttcgcaagcactgcagcagttccgagagaagctagaggaggagcaagcgcgctcaaggaaattagaggagcagttagcagccgctgaaaacgagctgaccgaactcaggaattttgatctcccagacaacgatataactatcgcgttgacgaaggagttgcggaattcgattttacaactagccgaggagaaggcgatttcaaatggcttgcgcaacaaacttgcccttgtggaaactgagttgaatttgtcgaaggaatccgtcaccacgcacgcagacaatctacttaaggcgcaggctagccatgctaagaaactccaggatgtgcacgaagacatgaacaacctcacgagagaggtggacgagcgcaagaaaaaaactggaggaccgggagaacgaggtggctacgcgagagaagaatatggagaacaaggaggaagaactacaagtcaaacccgaggagctgcaatctcatgaggccaagctcaaggaggagggccggcgtctccagaacgtaacgcatcgcctgcaacgggggcgggagcagttggacgcggataaaaagaaacgagagaagccgagtcgagagaagcaacaaggaggccgaatatcgctgaggcaggcgaagattttgaatgaaatgaagcgccagacccggctcctggaagagcagttcaagaacaacgggtgcccagctgcgtttaaagagctcgaagccaaccgcaaccggatcgaggaagagagggcggcgatgcaagcagaacgggatggagtgagaacgcagttggaatcgatgaaggctgcgctagaggcggtgaaaacgcagaacagcggattgcaagacaccatcgcgaggcaagagctgtacttgagtatgttcaagcatagcgtggtgaccgagaaagctatcgaagagttcacggaatggaacgccgagatccgaaatggtaagccgcttgagtttctgcttcagtgtggtttgacattgtattgactcccattgtctctggattgaaaaaatgtaggttacacgagcacaatgcagaagaagcgcgacttcattatgggcaaaatgaaggaggcgtttggatcgaagacggcggacgctgaagagttcaaggcgctggcggtcgagttctgggagaaaagaaatgagttggtccacgacaagacaggtaccgtcattcactcgatggaccacggcagatacgcgtgtgtatgcgtgaagattatggaagcattggctgcgtttgagagtgccatcctgctgtagttgtgtgtgctgctgcgtaacgatgaatgaatacgcattttcaagtcaccgaggacttagagcgagtcaactttgactcgaatacgcttgttttattgatcgcgaagtcaacatggacctaaaccaagtcgacattgactcaaacgtactagtttcagtaatagcgaagtcaacgtcgactctgaacgagtctacattgactcggtcgacagcgacccaacgttgacttacaaatccaaaaaaataaactcggtttcagtatgaacccccaaagggtcgttttacttgagtttgtatagacagtatccgaagcgaaaaatggccgacttttcagatgaaggggaccgccaactcgttcagctcgcggtggtgtacgagcaagcgggaagacgaaccgactgggtgtcagtggagaaagacatgaggccgtcaacatggagcgcagccaaactgcaacagcgaatcaagacgctcaagagacgatatggcaataaagtgctgagtttcccccacgctatttccgcccgccaccagaccgagcaggactgcatttggaagccaaagccgcgtctcctctacggttttcgccatcaccacgtatcaccgctagaaacctacagcgccactggaggactattctgcctactcaccaggcgtgatgtgcgcgcgagtgaacgtcagcaaaatgccggggagattacaatggctggggtgtccatgctgatcgaaggagcgaatattcaagtgaatgacgtgtttctggatgctggatccggcgtgggaaatgttctcgctcaagtcgctctgcaaacgcaagcattttgtgtggttggtattgagatccaacgtgacctggccgctagaggtatggagctgattgcgtctagggcatcgcgctttccacacttgctcaagatcagcgtcgtcgccgcagacatccgcaatattgctgaaggcagcgatactgttatcaatgctgatccagactcgaagttggctcaacccagctcccttatcagctccgccacccttttattttgccacgacactgtgttcgatgtagatgtggttttggcaatgcgtgctttgttcatgaagccacctcatctacgctgtcgacacgggtgtgtccgcggcatcgtaatacgtgccgaaattcgttttacaagcggtggaagttactgaaaacaattcaggttccgatgacttacagcatctcccttcgggatttacacctctacacagctgaaccaagatggtcgatgcagtaactacgatcactactctaacattgccgccgagggtcaagccaacaactatatattaattgcatgaaaatcaatcacaactttaatcaacttcgacctgcagttgagtttgacagcgtaatgaagccgctgtcgtcccatgagctgtcatacgaggtctagagaacccaatacaagatgaagtgttcgtagcggacaagcttactcgagtcgacgtacggcatcgtgggctccgtaaccagaccccagctgaccatgaagactccatgcttcaagccgccgttgtagctgtcgttcttggagtcttgccacaccccgctgtccctgtagtgctcttggcgtcctccctgccgcttgtttccaccgtcgtgccctcggcatcgtgcttggacattcgctgtggagtcgactcgcgttagggtgaagtgtcagcacccgcatggtttcagcggtgggggcacgtagcttaggtgggcgcagatgcgcaagatcgtctccttgctcaactcctgccgggagtagccggtgaacatatcgttctgaatgtaatacgcctgtcgacaacaacaacaccagcatgagcccctagatatgaacgccaaagctgccaagacgccgccttaccttgtgggggttgaagatggtgtccagctcgcacacctaccgagtccacaacatctctcagcgtcagcctcccttctgctaaagctccaatagccctgacgcctcacgtacattgccgaagtagcggtcgggctcctccacgaacaggagcgtccaggtctcgatcgaaacaactcggtcttcgcagtggcaccggcagagccgtactcgtagctcctcgaccagcgtacctcgcgcgtgtgaaggcatctatagaaggcaatgatacaagggaaaagaaagttaacattagtgagcggtgcatcctatcaactcagaattttaccatagcggagaagcgctaatccttcgcgggcacctgtcaatctgcgggtgtaaatgcttgtgcggtggccaatggtggcgcggaagcccggcacccatgcccatctacctttcaaggtgagaaatccgcaaacagatcccattggccaaaacgctctcggcgggaccttgaagagtcgcagttaccctaaccacctgtatggcttgaaccggcactttcccccgaggtttgtcttatcccagcaaaatcgggataacggtcgccggtgggttaagcggtgggtcttcggtccagtcaacaaagcctagttcagcgcgagtgccgttgtgacctgttcgtctacacttgagcaagccgtgtatatatgggcaaccacttgtttgtacaaacggtttggtacggccttgaggaattcgtggaccttggtcatcacgtggtaatagcacatcacgtaggcgaggtcggagtcgacaccaaacccttggctgaccgcgttccttcgcgtcggccataacgtccttgagcaacagctgttgttccgtcaccttagtgttttatatctttcggagggcggttagcgcctgaacgtagattccctctagtcgctgggagacaataaaaactgccccaaggaagaatgagcgactgcaatccgaaacaccacaaattataacaggataagccacttggttcaacttgaaggtgccgtccaggtggaacacgaacgagttggggtctcgatccgagtagcacaacaagaccttggttgtgagacccacaaaacatggatgctcgtcggatccgttccccatatctggattgtctttgccatcccggtccaaaccaaacgagaacggctgggtatcagtagtggctggtccaaataccagttggtcgatctggtccagaatgtcctcatagccgtcgttgctgtggagatttgtcttggggaagttgctgccgaaccactggacttgacgcagggttcgcatctccgcctcagcaggcccaaatagccgaggcatacccatgctaattcgggccggcttcaggccttgggtcgccatttcacgcccgtagtccatcagccggggagtgagctggggtttgcgacggtcccgagccgctgtctcgcgacaaccagtctccacaatcgccacctgattcagctcttggcaagtcagaacattgcctagtccgcgtatggcgttgctgccgcccatgtttccgaggagcgcttcagcaacttgtatcgcatcttatggttccagctgacggtttcacgatgatgaagaccatcatggcctctatgggcagctgggagtcttcctgcagatggttgtccactgggacttgggggacatcgtgagtcgggctgcgggctgcatgagctggtgtgagcgggttgcggggaatactgtcttttcgagcatgcaggaagatacacacggggctaccagcagctatgaggtagatatagccaaaatacactgttttcattggttgaactcgactgctctcatagatactactcgctgatattgagtggtgtggggtagcctgggtttggttgctgattctactcgcggtgttccgcgcgtcttcgtagtgtggtgcaacatgtagttacgcaatctatatttgtattcgcatatggtgtgcgtcaaaccctttttctgtgggttttcctgggttctgtctcatcgccatcgacttgttgctagcctaccctatagctcgggttgcgatgatcgatgtattgcagcgtacattggtggacggaatccacaagaccagctcacgagctccaggagaactgaatttctatcgcgccttggagccatgatacgcattaagcacggtcaaggccagcgttttaacccttttaagaaccacaatgaatacgaccccactgggtaccgtgtacaagagctggaaagatctgatcaatatcgctattagatattcttagattaccgcaatagtgacagcgttgaggtggtcttcattgagtggaccgagggtgtgcagacctggcacacccacagtttattggagtgggaacgagcccacaggatttgcatacgctggctgagtgacaccaacgtggtcgccccgaggcgattactaagtacttgatcaaacctggcggcaagcgtaattatacagacagccgatacagcgactgtaacggggttacacgagagttacccgaatggttacgaagtgggtacatactgtctaacctaaatcagtaggagaatcagtacatggcttcagagccactgattatgcatatgactagggttcactatgctagatagtgaaccggatatatttacaccgtaggcggctttgccgcaataaagggaaatacattcagtttgagatttacactgaagagtctagggttgactcttggagtccgtagggtgcacggactcgtacgttctggtattagaacgggcgatcttaagcggagactctgcgagtctgttaagcttcctctgacgcaaagctacggcagccccgctgcacttggtagcacttgtagtcaatccgacacctgagtctgtatagactgaccctctgtggagaatggagcagttcgctcacttgcccccgaaccagcaggatgtgcttaaaaaccttatgtccttgctggggtgacgcaacttgcgcagcaaggctccgacgcggtgaacgcgcgtctcgaggcgttttcaagctacgagaatgctctgctagagcacctccagcagaggatggcgacggccgcggcgctctaagcgcccgcttcgtcatccgacgcgggaacaagacccaagccgctcatgttgagtgtgaagaccttcgaaggcaaggagggtgaaagattgatgctttggacccgtgaggttgagatggctatgagctcagctccactccggacggagtcgcagcgcgtggcactagctacctgctacctcgaagctcggtgggcgagagagagagtgggcactaacgtccgggacgtcgttcgaggtggccttcccgacatgggaccagctgaaacagcaattgtcccgagtgtttgctccgtctaacgaggcgtatcgcgtgcgctcacgtttcctggcgaccaggcagagcaagaaggagttcatggactatgtccaagagttgagaactctcattgctggtatgtctgcggaccccctgccggaggcagtcaccgttacggtgttcatggagggcctccgcactggcgttgccaggacggaagtgttccaaacccacccgagctctttcggagaggctgtgagcgtcgcattgaatgcggagcacaactttaagtcgtcgagacttgggtggaatgtgtcttacgctagcgggtcgactggtccggaacccatgggcctcagctatgttgaagacgaagaagccgagcttcgtgctgctgagcagcgtcgcggtatccgcagatgcttcatctgtggtgacacccgtcaccttcgggctaggtgtccgctgcgccatcagcgccaggcttctccaatccgctcttcgagttcgagccagggctctggtttgtctcggggaaacgagaagtcccagtaggcgcggggcggcctactggggaagaactaagttctattgagcctcggcgaggtggaggtcgacaggacttagccccgaagagagccgtactctctaacacggaacgtgtatgcaagacgggcttgctagttgtccaagcttgggtgaagggcttcacgaagccatggacgattttgatcgattcgggagcgtcgggtagctacgcccgacattccacgatggacggaagtcagctttatgatgaggcgctggaagcgcgcgggaatgacatcgtcactgttcgtctcgcgacaggcactcgtgtcacggtgcctaaggtccctgtggacctgggcgtgaagtttttggattttgatagcgtggaacgctgtctggtcttagacctcgattcgagatatgatctcatccttggcatggcgtggctggaacgccatgagtcttggatcgattggaggcggaagacccttgatgctacgcacttctctcctggcggagcattggcgagtcatgaacccacctctgctaggaagcagaagcgcttctggcgcgagcactggactgagttggtcaatgtgctggacatcggagtttccgagttggtggacactgagtgtgtcgagaacgagcgttccgagcgtggcttgcggacggcaggtggggcggcacgaattccgatgagcgggtgtgcgtctgagggcgacgccctgctgtgtgccagcgacggcgcggtcggcacgatgccgaaggacaaggggctttgcccggatgaagatcgtggagtggcacgtaatccactgagtgcaggctgcggatcgtgcagctcttcgctgagtgtcggtaaagacactggagctcccctggagctgaacgaggtggtgacacctggcaccaagacgcacgcgaaatcacggagctcttcagcgcggaaggggtccatgaagaggaggcagcgccgcaaagtgctggctgcgagacgcaaggcgtctgcgatctcatgagtcgagaagggcgtgtcgagcggtgaggctccacgcgagagcgagcagctctatacactcgtgaatggagtgacacgcgacgtcgacggaggtatcgacctcgacgacttgccctcactgtctgctctcctggagctggacgagatgtccttggccgagttcggcgaagccttgaaggctggagacttggccgaggtagtggtcatacgacccgaagaagagttgaactcgtcctcgcttctggatgaagctgtcctggaagacacaaagaaggcgctgaatgcgcggagcggatcggcaatcctgaagaacccgtcggatcccttgtatcaagtggtaaaggattaccaggacgtggtctcgaaggagccgccctcggggctacctccggatcaaggtgttcgacacgaaatcgatctcgttccgggaacgaagtactgcgtgacgaggcagtggcccttgccgaaggagcagtgtgacttcattgacgcgttcttccgtgcgaagcacgaggcgggcatggtgcgtgagagtaagtctccacactctacgccgacgttctgtgtcagaaagccgaatggcaagtgtcgtatcgtgcatgctttcaacaagctgaatgccgctaccattccggcgcagacgccgattcctcggaaggatgttctccacaacaacatgacaggatgtacgatgtacagtgcgctcgacttggtcgatggatattaccaattgctcatgaggacgagcgacatttctctcactgcggtgagtactccgagcggcatgctctgggagtggttggtgatgccccaagggctttcgaacgcgccagcgacgtttaatcgtcttgtgacgcagctcttcaggccccatcgggcgtacgcgcaaacgaaattcgatgacatctttgtccacagtcgtgcggagcacggaaggactgatatggataaccatgtggggcacctgcgtgctgtgctcgaatgcatgcgtcaaaacaagttgtacgccaacatagacaaatgcatcttcggagcggaagagatccccttcttagggtgcttcatcgggaagcgtggcctgagggccgacccggtcaaggtcaaggccattgttgactggccggttcccaagaagtagaaggatcttcgcaagtggcttggcttggccaattacttgcacaagtacagcgagaactacgctgagatggctcagccactctccaatctcctgaagaaggatacggagtggtgttgggacatcgagcatcaagatgcgttcgtggcaattaaggacagtctccttcatgcacctattttggctctgccagaccccgctcgtccgtttagtgtcgtctgtgacgcctcggactttgccgtcggctgtgccctgctgcaagcagacgccgaggggcgcgagcgcgtggtggcgttcgaatctcgccagctgaaggctacggagaagaactgtcttgtccatgacaaagagctacttgcgatgaagtatgcgctcgtcaagttcagggtgcatctgttgggctctcagccgttcgtgatttacacggatcatgcgtcgttacgcactgcgactcagtcgcctcacctttcgcaaaggatggcccgttggctgtccttcttcgcggagtacaacttcgaggtgaggtacaagcctggcaggcagaatgtccttgcggacgcgctgtcgcgcaggccggattatgagctggttcatgtaacgaccgtgacttcgtcattaccggatttgatccgaacggcttatgccaaggacgacacctgtgtcgcgctgctgaaggctctggggagcaaggagtttcaagactcggacatggaattgtcagcgcggctgcgcgcgcggctacaccgttattccctcgatggaggcctgttgttctacaacactggccccgaggatacgccccgcgtggtcatccctcatgacgaggaactgaagtaccgcatcctatatgaggcacacgacatgccgctggccggccatcttggccgtgagaagacctacagctcggtgagcacccactattggtggccgaagctgtacaagtgggcgagcacttatgcgcgcacgtgcgagacgtgtcagcgagtgaagtcgtcacctcatgctgcagcgccgttggggagtttgtctgtcccttcgggctgttggcaatccatgagtatggactttgtgtttggcctgccggcgggcgcggcggtcaacactggagtcgtggtcttcgtggaccgactgagcaagatggatcacattgcggctgtgccggataccatcgatggtaaaggtacagcaacgctgttcttggaccgagtgtttcgacaacacggactccctgagtcgattgtctcggaccgagacccccgcttcacgggcaacttctggagcgcggtgcttagcaccaagctggacatgtccactgcggaccatccgcagaccgatggtcagaccgagcgcgtaaatcgcgtcgtcgaggacgtgctccgcagcatttgcgctgacacgccgaagtgctggagcgccatgctgccactcgttaagtttgcgttgaacaacgccgtgcacgcctcgacaggctacacgccgttctacgtgaacagcttgtctcatccccgcgtcccgctgacgccgccacgtggtgacctcgggcttggtgggggaggagaagccgacttagctgatcggctagccgatgtcagcccggctactgttcgtaaacaggttgacgctttcttcgacgcgtctgagtgtcttacgacatgtgcgtgacgcaatggctgagagccaagacaagcaaaaggaacatgcagatgccaggggcagaggcaatgttgaaagttatgaggtcggggacctggtgttgcttaatgctaagaacctacctacacatgcagtgtctgccgtcttcaagacgaagttgcgccagcgcttcatcggacctttcaaggttgtggccaagaagggccttgcgtacacgctcaatcttccgaagaagatgcggacgcaccccgtcttctacgtgggcttgctcaagccgtaccaggacccgatgcaggtgcagatggaggcaccgaggatgacgaggtcacaggcacggaggtcgcggtcgtcgaggacgcgaccatccacgcgggcaccgcaggcacaggcggaagaatcggcgccggaggtgccgcgggcacagcgagagccgcaggcgcaggaggcgcggcagtcggagcctgcatgcgggccaggaggtcgagctgaccctgaaacacagcctggtgactctgtagctccccgagctcccggccacgttgctcattgcgatcgcgatagtatcgcacccagtcctcagtgccccaaggcggtcttagaccgctcgaggcacctcgatccatcgcgtccgctcggcgagctcgtcgagttcggtggcagtccggcccagacgtgcatcaacgtcatggatatgatcccgaaggcaactcgcctgctgccgcacctccaagagctcactttgagtcgcaaagatccccacagcggcctccaccggccctgctcgatgagcatgggaatttacattaccatgtggagcgcctcctggctaagcggcggtgccggggtcaaaaccagtatctggtgaaatggcgaaggtaccctcactccgagaactcatgggagtttgaggtgcccctccgccaagactgcccagacgtcgtggtcgcttttgatcagctttatcaccagcgccccgagggctcaaggccggcacgccggccgtcccgcgcttcccggcaataagctggggagctgctgggtcagccacattgctccgaggctgaccctgagccatagcgctcactccctcgcgggaaggaacggctggagtgctcgaaggagcgaagcgcgcagcgctaaactgggtctgcggctgggcgagagccgagaggctgcgcttggctcggaccttcgcgaaatcgaagcggagcttgcgttcaatgcgaacatccacttcactgaagctggctcggagagcgtccatggagctgagctttcggctgtgctcgacccaagactcgaacggagcttcgtactcaattgagtcttcccccgggctaagtgccaccgggtacgtccgcatggcgggcacggacttctgctgggcttgcagccgcagcctctcgcgatactccgcgacagtcgtagactgtggagtgaggagccgctctcgcagagacgtacgtagtgcgagctcctccggagtacgggccgcgggcccaatggtgtgcagcgcgaaagactgctggaacgcgtggcgataagcctccgcagggtcgcgaggccggaagccgtagtcggcagtgctggggttcagcagaggccgcagctcggggcgctgggagcgcgtgggagccatctgccccgcaacctgctcggactgagcttcgtccaaagggttggagatgacggagcccaggggcacgccctcaccacgaggtggcgaataccgtggctcagtgagcgcgcgcagctcgtagaggccggaagagcgttcaggaaacgggttcggagttcgcagcggtggctgcggctcctccctcgacggcgcagcgcgctctgcaggtggacggatcggcgagcgcacaggagacgtgtgcgcggggcgcccttgatcgcgacggctcggagagccaactggggccggtgagccttcttcacggcgtgtcgacggtgtgggcgaagcgtcgcctcggctcgggtagcgtcgcgtgagtggggacgcatctcctcggttcggagaaccctccatggactcgtccacctcgccctcttcaccaaagagttcccttgatctggcgggttggtgctctaggagagctggggcttgcgcgctgcgagttgcgcttcaggcgttgcgccgcgaagtacttggacaccgagagccgggaaggcgacgagggtgtgcgcgcgggcgctggcgttcgctgaggtgcggaggcacgcagtgcagcagcacgagaggaacgaggctctgaggcggatctcgcgagaggctgtctgcggtcgaaagaccaaaaggctttatgacttgaagtcatgtgagggcgcgttgcgccgataagttctcagagtagtccacgcgatgtaaattgattcgttcgagaaggaggcttgacggaccaagacccggtggttgaccgttaagcgtgaacacccatgtccacggtttggtgggggagggtgtaacggggttacacgagagttacccgaagggttacgaagtgggtacatactgtctaacctaaatcagtagtagaatcagtacacggcttcagagccactgattgtgcatatgactagggttcactatgctagatagtgaaccggatatatttacactgtaggcggctttgccgcaataaagggaaatacattcagtttgagatttacactgaagagtctagggttgactcttggagtccgtagggtgtacggactcgtacgttctggtattagaacgggcgatcttaagcggagactctgcgagtctgttaagcttcctctgatgcaaagctacggcagccccgctgcagcgaccgtggagggttggatgtttgatgggcattggagtagcgattggcattgactccaaagcccgtgcgtatatcgaggttgtcgatgcgcaagtggtcgtattggtgaaggctgtcaaccgaagtcttggacgcccggcacacctccatctacgcaacaattaacggagcacggaatagcgggcatcccgtttctactgctaaggtcaggggggtccttggtttgcttttgcagggctcgagtcgtccccattgttgtgctagaacgggtgagtgagggcggggagctatagacgtttgtgcacgatgaccacgccttattccagctggacgacatgatatggatcgacgtatcaaacttgcagggcatccacaaactggtagtttcttagagaccgaggcctacctacgtttttcctgcaattcatttttgttgatccaccagtgaatgttgtgccgtgtgttattggtcgctacgcgactcagctatctgtgggtgacgtttcagcagttgggtccgaagaaagcgtatttggattcggtacttattcccaaagtttttggtccttgaatttcaggacaaaaaatcgcacgaggcactttccgggtttgtcattaaaccgcgaaaagggccaaaacagacttggtgcttgcaaagagcttaatcacaccccgttaactacgagggttttttgtaacaggtacatagactgtgtgaggcgtaacgtctgaagctgaagctggctatgatctccaatgcccgactagccaaacgcgccgtcaatccactgaaaagcagcaccctggacagcacttcagcggatcggaagctgggatctgtcttgcaagtgctttggtggtctaggcgtcactgatggtgttcccggagctgacgcttcactcgtgcatggcgcgcaaactcagcctccagacctcctggcgtacccctccctatctttctcgcgggcgtgccgatgctggagtagagtgcgacagctccactggcggtgtttcaacggcctctgagctttctccataccttcctcgtatctggcgtgctggctttcagcttttagagcgcgacctcacttcccgcttcaagccgctcggtgctctcagggtagaccaagtagatctcgtcgcccgagcctctggagatttagcattcaagcgactcggacaagaggcttctgctgctcgtcatcctagcgagaaattgtgcatagtacggcagacagagctgtgcgtccttcagcctgtcccgaaagccagcctaccgtaacacggcgctagtatctcggagaagaagagcgagaataagtgcgcattacctcgaggactcggggcagcgcttggttgccaggcagcaggcgacaaagtacggggtttacctcttggtggggcacatcttgcctgtcgtgatctcgctcacgacgcacttgtcgcgactgtagaacggcacagtcgtcgtcacttggtaagtaggtgtccagccacaagtgtgcctccgcctcggaggtatcgaagtacttttgcggcgtacattggtggacgaagttcacgcgaggcccgtgtatccccgcctcaagcatctctatgtgatcctaaaactttcacaactacgaaaataggaattgtcgtcaggccgaagtcgctcgagatgttttacctggatgttataagtgccgctaccaacccaaatcattacgagtatttcgaaagtcgacattgtcgttgatatttcgcctaaagtataggattgtgataataaaaaacatcgcgtaaaaaatgtccatttgtatgataaaggcaaaaaatattctcgatttttatcaaattgctagttgtttaaaccttgaaaaacaaggtataataatctgaaaataacagacggtatttaaaaaagaatcacaaaccgcaactcttttgggatgtacaaaaaagtattacagtttttaaaatattgtcaatgacgattttttgaatttgtacttgcggttaagactatcgattacagtgacggcggcaattactctgatacagggttttggttagcgctacttttgcgatttaaaataaacggtctaatctgcattcacatagaccaactctaaactttaaattagactggggtatactaaatagagtaagtataatacgaaaactgtgaatcaagtatatttttactaaaaatgcaactaataattggttgtaaataagctatgcattatttgataacaaatgctactcatgctaagcctaattgaacatgactaaggagcttaatgttaaataagctgcattttggttgccaaaaactttcaataacaatggacgagatgttacgtcagaaaaaaaaatgtgcgcgtggtctctggcgctagcgcgaagggcagtcaaagatttacatcgtttgcttggcgaatcagaacaccgaataggtactgttgttatctgcgagcattgtgttcccgtttttaaccgaatgcatatcgtgttgtaggggcttctagtagatattcttgagtgggttgcaagcggtcagactgtatcttctggatagtaatatttacaaagtcatatattactatgcaatgtgttagtacttagtttaagaatgagtataaggataaaatatgtttactataatatttatgaaagtcaagaggtaacgtaagtagacgttttgaggctagcttcactacatagctacgtcccaataaacggatggaggacatctacgaagatcacctattgcaaaaatgtaggcaatatcacgtagagcttgaataagagcctggccatgcataattattttttaaatagtgcgatgtaaaatcaccagagccattaccatttcaaaagttgataaccctgcggaaacaggaatggaatgaatatacacatgctagctttatgcatatttgagtttaaagtatttactactattattgttttttatgattttgcagaaggtagaacgctatgatcttacttgtggagaattgatattttatgcaattgtcgctactacttcaatattacagtgatctgattagtagatgagacagtgttcgagtcgaaacagcgtatttcgaaacatttcgctaaaactagtcatttcgaatacctgcttttttaacagctttgagctgcttcgtggaaaacacctctaccatgaatgtcaaaagtagcgatttcaaggcacttgagggtttagtaaattgaggtataaaagctcaagccacccaaagcagctattttgttggccaaatgcggatgggggcggattatttttatgcacctgacgactgctttctattaattagcggctattttcaatacacgccgattaattgtatgcatgagggtgatattgtatgctgtcatgggttattgtaaatagctcgcaaaatattcgacacgccaccttcgacgtgtacggtgacagtaaggtttctgtatgaatggaattgctagcttgataaaggaatacgcagccctacaagaaacaatatgtatgtgctgtattcattgcagcagtggatgatatagaatcgggttgtattcggatcatggttctaatcttgatacattgattaatagtttgatcatttatacgcgatttgacatcaaataaatctcaaaatctcgtgatatatgcacacaaagtacttgccatcatcgcttcgtaaattttaatacctagtggattacttaaccgtcgttagagggcaatacggtcgcgcagatgaatcgcattagatcaaaacaaacgtctgcatgactacctctgtagctcaatacgacacgcccttggtagactgtagagtgctatataattgtcactaactagaccgcgacctatattcagtgtgcttcgatcgcaagtacgtttttagtccttactcgcaactcggagttcgtgttatagctactgtgggtgcaatgctcccgggtggtgattcacaagttcctgcgctgatctgctgacgccatgagttagggcaaacgcaaatcggctctattgattagcgaacaattagcgctgatggagaagtccgcggtatgaggtggggggtcggcttgcccggacgaaggccgaaaataaatttgaggcgccagcttacgcgaaggcagagtgttttccattattgtcttctctctctgtgaatctaaaatagctagcacgtaacacccaatcctaagtgagggatcgaacgtgggctactggtttttcttgccaatgttcgttttgttttgttgggcaggggagtagacaacatcccaaacctcaatcgagggaaaatagtttttcgggatcaagcagtgaaaccaaacagaatatctcgcaaccggactcagactctttgccgtgcaatgcacgaatatttgaatatttgtagcgaagcgttgttagtctaaacgtttccacgcccctagaaaaagttaacacattgcactacacccagctactgcacttgtgactcgatggctgcgaaacaaggtaaaacctttatcaccatgatcgtactcagccaatgaaccaccacacgcagcctacaacctcgtggaagacctcggtcccgattctcgccttgccgacccacagctcacctgcggtggctacaccggccctagctacggcaccaatgcctcgaggagggggggggcaaggaggaaaccgtattgtttatagtcgcctggaagccctccgacctggttctcatgttatccatccccagtccacccgcggcggctacaccttaggatctatccagctcaacattcaatctggacttggtaacacttcgacatggctcgattacacccccatcgcttgaaagtcgtttacgggaaagccatgacccgttctgcgtactttgttaggagggacagcatcgttttatcgtatagagcgacactactctagtggtgaggttagcaagacagcatgactctgcaccaagtagtagagcgagaaatgacccccggcttaactacttctgatgctccattattcaacagctgggaggactgttgcccatgatatgatagcgcctgacccactaccttagtactcctatgccaccgtaaagatatcggttgctcatacgacctgtcgtctatttgtgggccagctttggtatcacgcactgctagataggctggtaatgcaaaataggtttggcaataccatttgagtgctagcaccatacaccacctacctatagtcgtgaataacacaagactgtggttagtgtagtttggactcaaattttgcaccaagaagtatagtgttggcaggccctgtcgtaatgcgtggtgctaattaagtctgcgatggggtcagtaaaactgacttaatgtagctttaggttttaaagccatgcatgaattatcggtaaatctaaatttaaagaacatttatttgaatacgattccgatttaaaacattgatggcattggttcgttaatagaattaatcctagataatacaataaatccccatgtaatagaaagtagccgatggatgcataaaaaaaagtttttcccaatgcggataaaagtgctttttggtagccatctcgaacacagcctgaatatcgcgggaaacactttgtttgtggtgatagtatggttccaacaatagccttcttgttgccgtcgttaaggcttctgacgagtttttgaatgaatgacaaaccctgtttgtacctttcgctctttcattgatcctttcaaccaaaccatttgcacgtttacaaactatcccttttactattactgatccgtcgagcagagcagagcgacacctcgcagcgtccaatgcaatgggcgatggtctctggaagcgagcggcactgagaagatgtagtgcttgtcagtccttctggcgtatcgataaactggggcttcgtaggctccgtaaggtccatggtcttgtgctgctcgggtctttttgtgtgctttggttgcagccgtgacgtagatggcagggaggggggcgaacaaccgcttcggctcctgctccaccaacgtcccatcgggtcggttccaggccgcaccgtccagcatcaacccatgcaccagcacaccttcgcgtggaggttgcttgatctgctccagccgctcgtagtccgtcacctcgctgtagtagaccacgtcgtccagcgcccagcgctcgctcgcatgcgctcgagtcgattcctgcgctacggcagtcaggaacccctgcgggttggagaaacccgccagccagaagctggatggacggccgcgatccagccatacgcgtagctggttcactcggtcgataagacccgtaacccaaagccccaatgttccggctagccacgcttgctcgtttgccacccacgcgggaggcaccttgccgtcaaatatcgcttcgccggtttcacgcagtgaagacgtaagcaaaacttcacctgctaacgcgcgctgggtctttatgagtgaagctcggacgaatttcaggacgtgccgtagcgctcgagcttcttgacacaggaacagattcagaggcagttcaagcccacctccgaggacctttgaacgcagagcttgacccaacgattcttcactcaatgcctcatctcctccttgtggtagcgctgatagcagctcacggatcttttgctggataatgtcttcccgagtttccggtttactggccgtagcagcattcccagagccagtgtcagcgtcggtaggctgggtgtcaacgatggtgccgagcagggcggagacttccttgacgcgatacgtcagatcagcgttcgggtgcagtccgaagacttctggtgagtcgacactcgggaacgcagcgatgaaccgatggtactcttcgatctccgccattgaggactccggcagacagtagttgaatagctgacctgaagacgacacggtgcctgtccctgtggacagcttcacctccgggttgaaggaaaaggagctaccaagtagtgtcgggttgaaccatgcatcgcagtaggcacggaagagcctccggtccagctcatccatgatccgaccgccatagtgcacttccgccaccatatactgcaccgtcggccatgatggcgtcggtgacgtgaacaaatgacgctccaggaagctcagcgacgcgcccatgtctccagcgttgaactcgtacggcacactgaagcccagcggtccaaacttgcggcgttcaaccaccaccgcatgcaagaaacacacggcaaagagaagtgagcgccacgaagggctctcaagccggtccagtttgtcctgatccactagcaccgtaaagctgcgtagcaaacctgcacgcagaccagcaggcggttcgttcgtcactttcgtacttcgatgcagtagagcaatcgggaaatctggatgcggctccgaagtcaggaacaaccgaaactctggagcacgcgcaggagctgcagtattgccgctattccctgcacttcctccattcgcaccagtgagcgcctcacacagagagtccaagtaatttaatccaagatgacagttctgcagcagaacccacgagccgttcagcatagcggaggctacagtgcgcgctgccacagcctcttgaccctcgcccatggagatggtcgtcacactctggcgcttccttcgtgctagctgctcaatggactcagttgggtccgctccaggagacagcaaatacagcaccggcgtctcagctttcatctcctggtacacactttccaccgtatccgtaatgggctccgcgtagcgagggcctagcgctgggactctcgaaagactcacgccaacgctgccttcgatgaattcaatagcacgaatgaagtcgagaactgcaggaatcgttcggtcttcacgcaatgagcgtaccagtagtagtcgatggaagtggaggtttgctgtgatggctcgagggtcgaataggagcccttcgtagtcaggcaccgctagacgctccggctcattgtcctcgaaccacttgcgccacgcactttcactgcgctcgagatccccgagcaggttacggaagtgtggcttctcactcgcgagctgcacggcgttaagccacgcgcccgtcggcatccacccgaatggtttaggctggtcactcgacaacttccgcgatgccccggccttaaggaagagcgtcacatccgctggagttacacagtccgcagcaacgaggatcttcaacgcaatcatcaacaagaagctgaggcggtgacgatcgtacagaccgcggttcacatagcggaagacaatgtacgtgagcgtctccaggatgtacgtaacacgcttcgaggcgagtgcggagcgctccgcctcctcgatgccacggacgaatagctggaggaattgatccagcgacgtctggtacatggcgttcaccgccgcaaagtcgacgatgccgaagtagagcaccgacccacgcgcggcgactgggcgatagtgctcgcgcttttcgtcaatacctcgtttcacttcctcggctgcgaggatcttgtcgttgacttcggtcgctttcgctttcgtgttcgccaagacagacaccaactccacatcgtccagcaggttggccttgctagctgaaagtcgctcaagcaacaacgcgtcgagagccacgagcgctttcgcgttagcgttaagctcgaactgcacacgctcgagctgctcttccagcgagcgctgctcttggcggataacctgagccagtagctgctcctcaagacctttctgcgtgacggtgaagtccacaacgagcgttcgagcctgcagctccggcgagaagtgtgggtttggaacgcgagtcgtcaggtacaaggcgaaatcctcctggtactcgcacagccgatccatgatcttgacgaacttccccttggcgcgcacgacgaagtttttgtccagaacgtttgccatcattgggtcggggtcagcaccgtccacgccgtctagcaccaacgctttgccttctccaacgcagtgctcaagaatctcacgcagtttcggactgctaacggagaccacccccatagagggcaagcgttcggcctctcggcgtaaaacccacgccagcgcttgaccttgtggatcgatcagcaacgggaaacggggcgctcgcgctactagtaaaccattctggatggagagaggatctgacggtaagccttgcatcttccagtcactgacagtcccagcatcggcgagaaattcttccagcgccaagccgcgggtcagagggatcgtgaacgatggtttcgctaggctagcggtagcagtactattgctgcctgaagctcctggggctggaagggttggtactacacccagctcgtagggaaggcgttcacgtagcagtaggtctcgatactctcggttgaacggtccgcagtagcagaggaaggctgcggctagagcgcaatcgcccactagatgctgcttccgctccacaaaccggttcgagtcctcggtccaccgcaccttctcgccaccaagtccaccgatgagagctgtagcttgctccatcttgcgcttcgtagcttgagcgaaggcttcaactcgagctttctcggccatttgggtctggaagtcctcctgcagtcgagtgagcacattctgacacttctgtagcttgtcttccgagctctgcagcctcgcttgggcagcctcaaacttcccctcggcaatgcgcagcgcttccagcttgggtttcaccaccttggacgcctcgtggtacatgctcatggctttcacccagcagaacagtccttctgcagctttcgacgcgttcttggccactggagcactaaacccggcaagctccatgtaaggcgccatgagctccagcgtttcgtcgttcatctggtccttttggtgcttggagaagtagaaaatattctgcaggaagcgcgtgtcggccagcattcccgacttggcgatctgaaacgagtccaggaggaagtcgcacgtgtgtttctccttcccaacgcccagcgtcacgggcgcgcgctcaactttcaacaacggtgccatctgtaagatagctacacagtcgaagatgagtttaatgatatcgcctggcttggccaacttcttgagttcattcaggtcattcggtcggatgctgctcgctgctctctccgcttcgtccaggaagggttgcgcgcgcttgaggtcctcctcggccgcctccttctccgccaaaatgatggctgcgtcggccaaacactgctcacggatctgctggacaatgtcgttctccttcttcgcctcgagagacttgacctgtagcgtctccagcattttgttagccgctgcttctgctgccacgagcttcgcttcctcctccttaagcacaactttcatccgctccacatcctgagcaccctgacccagtttatgaagtcccaagttcactgctccttcctggtgccgtactccgctcaacttctcagcatacagctctttgtatgtcgtcaggaagctgagaaagctgcgcggagtctgcacaacacgtcgccgtcgccgcataaagtactcaccgctgaccttctcgacagcttgatgcatcctccccatttgaaccaccagcgcttctttagtagctggaggagtctcgagtccgaacttgtcgaggtacccttgactcaccgcggtcagcgcttcttcgggccacggcaggaaccagtcgatagtgcagccattaacgaggtgcgggaactcacgacagcggtcggcgaagcgtgagctcaccggcgacaggcacaacaccacgtggaggttccgacgcacacggtcgtggaagaaccgcgtgaggttgggcagcgtgtcggcgcggtcaggacattcacgctgcatggctcctcttaactcgcttgccatagcgaccaactcgtcacgcgggaacaaaccgggcacttcacccgtcgctagaagagcgttaacctgctccaagaacgagtcgtccttgatgtcggcttcagtgagcaggaaaacgacccccttgccaacttgtcccgcagtcttacacagtccacggaggtcgtcgaggaaagctgagagcgtgtacgccttggtgactgccaactgacagagctcgtggccactcaacgcggctgcaaggcgagccagcgactgcttgcctgatccaccgactccaaccagcatcatgttgctctgagcaagacccagcacacgcgtcagtcgagccaagtggaacagagcttcctcgaacaggataagcggaggcaacgctcgcccaggattctcgcggttgaactgcgccaaaagatgctccaccctggtacgcagagagttcacgctggacacgggctcatagttgcgaggtagatcccccacgggctcaccaaactcgtccaaaggttggtcttggaggaagtccacgaacatcatggcttgtcttgcgctcaggactgagtgcacggactgctggcgttgtggggaatggtgcggcaggtggccgtccgtcttctccttgtttgcaacggagcttgagctgcctgtgcttccaaccagcttcgagaccagtccttcggcgacggcggtgagttcgtcacagaagcgctgcttgtcttcgagcgagacaagtctgtcggcaaacactcgctcactttcatgctgccaaagccgaaccagggatctatccgaagcggtcgcgctctcgaccggagctcgcaacaaaccttggaaactgcgactgagctcgcgtaagctaaagacgtagtggaacttctgcggtgtcggcggcatcgagcggcgcaaccagagccagagctgcacggaggctgccgcgagacggttaattagatcgaacagatacttcttggggatgcctgcggttgaactgctgccgtccatgtcaggaaggaaccgccagcgggttagttgggcgaagatggcttcagccacctccggcgagggaggcagcaagttcaggatgaaaaagtgacgcttaaggcgagctggggcgtcattcttcccggctagagggagccccatggccgcgaggaagcgcaagccctcgatcaccttgatatcaccacgcttgtccttgtcgaggaagcacaaagttcgagtttccactagttggcgcacgacttcaagcgtgggctggtctccccactcattgagcgctggcatggacagatcatccatgaacaacgtgagttgctggccgtttgacgggccgaacgtcttgcctccgcgcttctccagatcgccttcgactgtggcttggaaggctccacctagagtggcgcccgaaaagatcaatgtcctgcacgccaagccctctccaccttgaccattgctccccgacgatcggctctcgaaaaataaacgcgcaagtgttgacttgcccgttcctggctcgcctacaagcagcacggggagttggctggcgtgaaggtgctccaacaaatgcagcgcacgcgcggtgtcggttgtggggatgatcagacgcccaacgttcacaacaccactcgtgcgtgctagcaggttctcgcagctatcgagcgcccacttctcccactcgagcgtcgacggatgcaagaagtggtcgaagattgtcaacggctgggcagagtttgagctcgctgttgttcccttctgcgtgtcatgcgagtcgtgagtggtggccactgcgcctgatgttgccgtcaacggtgggaatgtcgttgcgggggccttttcaaccagatagtagtgcagctttactcggtcctcgaggtccagcacgcctccaaccgcccacgcaagcgaaaatgcaaacaaccgctccagttccaactccatgtctatagccgagtgctcactgagttcacaacgctccatcaacgactgcaataagttcaagcaggactggatcaacgccactcggggcgcgttcatcaccggacggcaccgtcggctcaagaactcgaacaggtgcccagaacctgaagtcggcgtcgtctcacttccacctacaagcgtgcggatacttcgcgccaacgctgctcgctgcgaatctggtcgcagtcgcagccaccgttgcgccactggttcccaatccagatctgtgtcgcttacgtacacgattccagcacgggatacagtcgcaggtgaggcattgcgcaggtcctcgacctcgaacagcaacttgcaattgtccgtcatcggcagacgatcgccgttggccaaagtcagcagcttattgtcgtccaagacggtgttcaaattttcaatccaaaccgcatcaacgggcccatcgcagaccaaccaggcgacgtctttcctggatcgatcgttgaacttggcccaaattgctgcgaaaacgccgtcgacccattctccagacaaccgatcggtctcgccaaacagttcctccgcgcgtactgccttcgggttcaaccgtacttgacgatgcggcgtgcgcgtgtggaaccccaacgccgtctgcaaggtcctcaaaatctcggacttgcccgagccagcgggcccaaccagcgcgataccgtgacgcacgagctgagtctcgtacagttgggtcaccttggcgctccacgttgcaggaggcggccagctttgcgtcttctgtagtacgtcttcaatggccccagcgatctcgttactgctgctgtgtccttgtccatttcctgaaggagcaggctccacgcctgggaaaatatcgcgcaacagcgacaagaaaatcgggacgtccgcggccaccaacttggagagattcatgtcccgcagagtcgtcatcatgagcaattcctcgctagcgagcaggttatcgcgctttgtagcacccgcagaacgcaaaacagataaaatattccgcagcccgaagtcgtagtgacgctgcttggacagttgaccctcacacacagcgtaaagcgtcttgaacttgcgagctagctcggcaaacgcgtcgtagccgacagcacacagtcggactttcatgataatttcacgatcggggaccatcattgccacacctcggaagagcgccttgaggttctccggcagctcctgccgcccttggtatcctggattcatcgtgatgaagtacgccgcatccgtgtgtagaccgataggcagtggatcacccgggaacgtaaacgtcggagcctgcacgcgcttagcgttcgtgattgccagaacttgctgagcaacaaccgaaagcacggggagttcaatgcggttaaactcatcgaagcagccccagaggcctccttggcagagacccttgaagatcttggccatgtccgagtagcgctgctggtctgtgcagttggtgacgatcacgtacactccaagactgcgccccaggtctttcaccgtctcggtcttgcccgtaccagcaggaccggcaggagctcctcctagatgcattcccagagcttgagacaacgtgatgtaggcgcggtctgtgagcggcgtgataaccaatcgctccttgcagcccaagtactcgaacgcgtacttgaagtccacgtcgcagatcgagatcaagcaggcgtccgggcccacggaatcgaaagccccttgaccgcccacacgccaatagaagcgtgcttgcttgagccactcgaagtcgttggcatccgagagtttcttctccttgtacagtctgcagagctccaggaagcagtcgcgttgatgcacttgaatcgtgattagagtctccactttagtacgggtgagcttcgtgcccaaatcggtaagacaccaagaagacagctcggataacatggtgccgtggcgcttggctgtctgtgccatgatccccttggtagtccgacaacgctgcagtgcgtcttgacactctgctgtccagcttagctgaatgccaagcagcgcgaactgtgcgcaggttttgctcacaaactctcgcagtgaaccggaggagcagtcggctgcagcttggcgacaaagcgtcttgagtgtacgccgcatctccttctccagcatccccagccagtcttcaatgttcccatcaggcagcacaggctgcaccagcgagatggtttcctcgtcgttgcccactaaagacttgatttcaacgatcttccgcttcgcgttcggggttgaagcggcagcagctgaagacgatgaagctttggcttccgaagaagccgacatgggcctttcgtgcacgacttggctgatgctgtcgaagattttctcgtagtactgctgcacagctgctggatcggagccccgtgacaagatgagcagcaagagcgggtttgagacgaagtagaaccgcgggaacttcttgcgcttttgctcgagatatccctccagcgacttctgacacttttccagctcgctgaagagagacgggagcgtgctgcggagtagctcgttggagcagcaagccacgacgaagcccacttcggacgccttgctcatgactttcagccagtctttgtcgattttcgcgaacttcttggcctcaaggggcatctgcttggcgatatccccacccgtgaagacagattcgagagacatccacagtgtctggaccttcgcccacagttcgagaacatccgctgtgtcggagagttgagccagcttggcttgtactcggtccttgaagaacaccacgtgcctcatgctcaatatggcttggagttgcagttggccttcctcgagatcctcaataatctggccgtagcccttgagcacaggcacacttcgcgctctccattcactgaattcaaacgctgtaccagcccaacgatccgtgagatcacgcagcttgtgttcaatctgcagctgcttctgcgcgctctcgcaaatgtactcaacgtcctctttccaggtgagaagcttggcatcgaggacgtcctggaatttgaacgagtcgttgtcgtacgggagccgctggccgttgcaggccttgatgatctcctcccagtgacgaggcttgatgctttctctcgtcagctcgcgcacaatgggcaaaacctcgaggaactcggcgatcaccttccgcaggatgccgtacgcctcccattcgcacaaattcttgggcatcttcttacagcgctggtcaaagccagcgaagcagtcgctcatacgctccacattcgcgccaacctgcacccatgggatcccgcggaactcgtccatggtcctctcgacgtccatgtagagaccgtagagctgatctagcagcgccatctccttgcgagtgcgaacaatctcggggtattcggtaggacgcatgccaaataattcctctccggctgagaacacttcgagcttccgctcgcggatcccaagtagatccttgaagcgcttgagacgctcgactgcctcggcgggctcaagccccgacgccatcggcccgttggcttcgtaatcgcctcgaaacactgccacatccgcctggaaatccttgacgtccttgatcagctgcttcttgaagcctccctgcacctccgagaggttgtcagtgacttcttctgcatagtcgacaagcttccgccatgaaccacgcaggacgctcttctgatccatctcgtccttgtccatatacccaccggggagaaagtgctcgagcatgtcgtacatgtccgcgatgggatttagctccatttcgatggcagactcgcgctcccgaacctccttcaacacgcccatgacaaagcgaagtgcatcgagggattccacgcgcgtactgagcttcgacgtcgtcgtgcggatataatccgtaaggttgaacagcgctgtgcgggcctgttggtggactttatccgagtactgtaccttccattggcggcactcgttgcgcagctggagcttgaggttcttggtgtttaaagacaacacagcgatgttgtgaactggcgcgatgagagagatctccgcctccacggccatgaagtgacgcagctctgtctcgaaatcctggatgagcgggttgcgctgcatgaactggttgtagcgaaactccatgtcttccttccagagccagtcgtacttcttgaaggccgagaggtactcgtggacctggttcttggtgccatgcagagctccggtgaggaggatagccaccttgatgatctctgtgtcgcacccgagccgctcaaacaaactcgtccgtgcagtttctgggaaaacgctttgttgtccccactcgtacagactcttggagcagcggagcacagcgacagccgatcggttgatcgctttttggatatcatccagcgacggactcaacctgacggacggaacggagagctggacgtcaacctcgaagaacggtcgctccaagaagaggaagcccgttccagccttagagcaaacgcgcttcttgatggcatccagcgactgcttcgtgcaggttacaagcgagcggtaaaagaggttcctgtagaagttgcggaacgtctccatcgcttctgtattgcacgcaattgtagttgacactgaagtagctgagacgcccccactattcacaagactagctgccgccgaggagctaccatccaaattatagtcgcagatcagccgcagtacatcctccacggcattttcaatctcgacattcttcgctgcgagctgccgcgtgacattcgccacgtgcttttcctgcatacgtacgaagtcatccagtgcaaaggattgatcggtagggaggtgcacgagcgaggccttggacacaagcaccaagttcttctcgatgcggttttcaatggcgtccaagacacttgaaatgagctcctcgagtcgctgcaacgccgcgtgagctacagctgtgtacgcatcaatgttcatgctcgtccacgtaagcgtcacgagtccaggtcgaagcttctgctggaggtcttccaagtgaggccgaagtaacacagccgtaaccggaatgatcttcgctgtcacgcggtcgtactcgtgcagagcgtagctcaggtcgttgtaataagccttaaacttgtcctcctggagcatgaccatccgtgcattttccggtacctcgatgcccatgcgatccaaacagcgagcctcgcggatgagctgcagtatttccttgtcaaagtttacgaaaagccggccagtttctggatgtcgaatgatgagcgtagcgtggagacctgctcgagcactttcaacagagcggcaccacgcttcgtaccacaagtactcgaacgccacgagcgtacgcgcgaccttgttgtacgttttgatgatcttcttcgagtctttcgtggagagcacagtcgggttgctctcgaatttgcgcatgggctcttcgattcgccgaagcaagtggcgcgaccagaggatgttgccagcaactggagggagatttcgggccactggagggtcgtgtcgatgtctttcgtagagctcctgcacgtgcgacagatccagtccgtagttgtggaaaatgacggtgaacttggagtccaagtcgctgcgcagcgtctcgcgctgcagaatctgctggaactgcttgagcaactgaagcgactgctcgatgctcgtgatcgagtcgaaacttacgttgatgaactgctgcagagacgcctcgaggtctgcgatctggatgttgaactcgacgtaatcgcggtcgaacttgttgttgtggaagtccagcaggtcgtgcttgtgcgcgcgaaactcccggatgatggtgttgaaagacgccagcagcgcgtccatgccctcgagcgagtgctgagccagagcgcggaactggtggatggtgctgaacatgtcgatgagcttgaccagcctccgacagaagagatcgaacttgccgaagatttgtgtctcgctgaagtcgaactgcttgcccttgggcatcgtcaggagcttgtccttggtcagtcgatactgctcttgatacgcttcgttgagcttcagacacgactcgagtccaagcaggagatcttccgggtccttctcccaaatggcctcgggaggctcgcgtccgaccagactgttcttgcacaaagtgatcatctggttggtgatcttcatgaagagcttggtcatccgctccgtcgtgttgtagtagcgcgcgatggtgtggatcatcttgacggagttcataagcgcaggcagagcgtccaccacagacgtaggggtccccgtgtacagcggctcgatgaagcgctccaacgtagcgaggtacttgacgttgtccttggcctcgttggacgcctccgtgatgttagtgtcgatctgcttccactgccgcagcagctgagtgatgcccagcttgtccatggctccgtcctgcagcttggagacaacgttcagcacgcccgtgaccatcttgcactccttggtcttgagctgctccgtgatgcccatgagtcgctgcagccgtcgcttccagtactcgagctcggtggcaggtccggcctcgtgcgactcccaccggccctggtcgttatcctcgagatacgcctccgtctgcttgcaccagtccttgaccagctccacaaagtgttgcacggctccgtcatcggacgacagcttggacaagctcctcgtgtccgacgggtcgtacctcttgtcgggcttgcgcaggtccagacccgtgttcatggccttgaggttctcctgcacgtccgtcacgaagctcttgagccccagcatgaactcgttgcgcgcgtcgctctcggcctggccccactcgctctcctctctggcggccagcatgggcacgaacaactgggacaagtgcgtctcgatcgacagcagcacggacgagtccagcacgccgtaggtcagcaagtggtcgttggcgaccgccgggtccagcggcaggcgaggcgccgtgtcgtacgagaagctctcgtccgtcgctgggtccgctgctgcagcttcctccgcctcggattgcgcctctcggcctctgctgctccacggcatccggtcctcgtcctgggtatccgctggatcgggcgccaccttggcgaagaagacggcgcggccctgcagcgtctcgtccaggccgtccgtcacgaagagctccttgcgcgcgggtttgtccctctgctgctgcagcagcagctcggccgtggaggacgagagggtgtcgtcgcctgggacgcccttggcctggtagtagaagaagatcttggtggggccgtcggcgcggaagaagcgcgagagctgctccatgatgccgttgccgcgcatgagctcctccacgtgcgtctcgtcctggaagcccaggcccagctgcagccgctggatcatccagcggtgccgcgcctggaacgccatggcaggagcgactgcggaatggcgtgaccgctgttaagttgaagtgtcgccctgcgtctcttcgccaaagattgtggtgtttcgtccaccaatttcgctgtgcggaccgaggtgtcctcaatgggcgtcctcaataatgggcgcctcccagtctgccgcgttgccgtgtgagctgatttggaagatgaagggccttcatcgctgcactgcagtggggcgcactccgcgccatgaacataagtatacgtgtgtatacacttcagtcacccaaaatcgaataaaacacaaaatgggtttttcgcgtgcctcaccatttcgagcgtagaggtgccagcgtgcacgcggtccacgcagtcgcggcgccgtgatacagtagcatgtgaggctggacgctagcgtgcccgaaggcgaagccgccactcgaagccgcattcgccacaagaggaggctgcgttcgcaggtgcagtatgaatgtcgcccgaaggtgtgtgctgcaagaacgataattttagccagtcaaaaagtacatgcagctcctcggccaaaatcgctcaagactcatgacatgaaaggcaagttgaagtgggtcttttgttattttgaccaggctacgagcagctcttgggagctgctgctactgctgtgctttaatcgcgtaagctagctagcacggagcttccagcatcaggattcccagcgcttagtagtgcccggggcgtccgccgtagccgtaggtgccgccatagccacggtagtatccacggttgccgccgtaatagcggcggtcctcggtgtcggcagcgttgttcagcggcacggactcggcagcaacgctgttgacgacgggttcctcggccgcagcgacaagagcagccgcgcaggccagcgcagcgacgagagcgaagacggtcttcattgcgatagtgtgcgtttccgtttagagcgtggcttgagaggaaggcggtcgattgaagagtgagcgagctcgtgagaccaacgggattaacgacattaacgcgagcgtttccgcgagagggctaacggcgtgatgggcttcgacgattaaccgtgtcatccaccactcgcatcctttcccagaactgctcggggcctttttggtcgagttgctcgctcattcggcaattgtacgtctcgcgcgcaagtcaagtcaagtcaagctcccgtaagaagcagacctccgtcgatgaagaccttcgcgatcctcgctgctctggcctccgtggtggcgctcgccactgcggctgagcccctcgagaacgaccctgccgcccacctcgaggctgcgccagcgccaggcgacgcgggagcaggaccggacgacaaggaagacttctacgggggaggctaccgctacggctatggtggctatcctcgctacggctatggcggatacccgcgctacggctatggaggctatcctcgttacggctacggcggctaccgctaccactatggacagtagtgaattctcggcgctccggggtcctggcggcaagtttgtctggctgcccctgcgctagcggttgacaggaagacaccgcgaagcatagtgacgtaactcctcgtcgaatgtttcagacgaagttttgaatgaacgacaacgttctcgttttgcatttgacttcctcagagttctgtccttgtcaattttgtctgaagtgctggcaagcaatgaggataatctttcaccacggcacccctcgccaactgtgtcgcttaaaacggtttactcatgaccttgtcgctcgagaaaaatactgagaagccgtcgagtggaaatctcggataacccagaagtttgagtgctctttgaataagtatacaatgttaatgctacaccgttaaatatacgtttatcttgaatttgaacacttagcaaagtaatttcgacgaatcaagtgcaaagcgctacgtcttcttgcaaattacgcaaagcgtcggcgatccgtccgagcttcctcggtgtttcagcgtcgtagaaagcaccacatctatagccagcgcaaatgaggagtgaacttgctactatgcacagcgagattgaagggaaacacgaactagtggcgaggaaaaaccccaaagcactcgcgaagataaatcctaatcgtcaggttcaaatgcgtcagacccccccccccacaaaccacctaagtcggccaccaccactcccaaccaagctacgatgaagatctctacgattgctgctgcacttgcctgcctcgtgtcgtttgcggcagccgaccaccatcaacgacgacacgacgcctaggtcatcaaggagatgctggcccgctgaatggacctacgacggcggggacgcagaagcaccaataccagccggcaagcccctggtgcccgagttatagtacgaagttcccatcgtccccgacatgggggtggagtgtgttggattgttgacatcgtagcgagtcggcagtggagcaggcgccatgatcatcgggtatgccgcagcaacagctccaatcgcgtgcccagccgcggcggggttgccggccatcgccgagtagatgctactcaccacgttggagataaccgccgggttcgtcgcgacgttccccaccgtcccgcggttgtcgggctcaagttgctcgaggatcagcttagcagcggcccggtttgcctccgggtgggtggtgctgttggtgcgctgtgcaagtcaccaaagcgggggattgaagttcaagccgaaagcttgcgtttatcctaatcatatcaatcgaatcgatttcattttgagttctcaataacgacgatcacctgtcagggccaactcaaagcgttcgatttgcattcgtggttgttgttgttgtagacagtaaagcacattcacaggaaggcattttgttctaatccagcgatcgaggcaccaaaccttttgaactttcatttcccagaaactattgtagtgaatccgagatgtgcgtagtgagcgcagaccgttccttgttcgtggggttctgacgcacttgaacctgacactaaggatttatccttggtactttcggacttttctgttttcctcaatcccgttaggttctgggactagccgcaatgagtgaggctcaatcctctctcattgttcatttggactccaagcactcaagccgaccgccaccgcccgacttccagctttctcaccgcaccgaccaccatgaagatgtcattcgttgcgatcgctctggccctggcgtacttcgtgtcgttcgtctttgcggtcaaccaaccgagcatcgtgacgtccccggatgagcgcatgcaggtcgccaagcagctcaaggagctcatgtcccgcaacccgagctcggtggacccggctgtcgccgccatgtcgacggaggacctcttcagtatgctttcgggtctcatctcgaacccgtcggtgctctccaatgttggaaatctcgtcaaggcggcgaccagcggcgacatcggcggggtggccacttctgcgacgggactgctgggtgcggctcttcctgctgcggtgtcggctttcacccctgggactccggctgctgcggttcccatggctgctgcacctgcgtcgtagtcggggctgtcagtccgtctcgtgaatttcttctaacacgcgtgatccatgcagtgtctggttgaaggctacataattgaatcgtgctcgcatctttttaatcgttttcaacaatcaagtgtttgtgtggcctcgggtcactcttgaacattgtcttagtcttttataagttgcatgattgtgccgtaatgctgatgctgtcatgattcccatcgttttgtgtcaatgggggcgagtgaggaactcgatttgtgtgctatagagggcgtgtgcacccggaggcagttcatattatcgttttcaagttaaaaatttgcagcttgtctatctttcttaggcagtagattcaggaagctgcacctcgaccgtctccggcgccacaggatcagcgatgggctctttggtcagatcagtccgcatcgactcaatcttctgcagtgcctccttcgtgaccggctcaatagtgttcgctccagcactcgacacactgcggcgaggaacgacaggctcggcgtcggaggcacccgataaacggcgggctcccacatcagaggtgcgtctctgagcgagtgaagctctgctcgccttgccactgaggctggtgggcagcttcatcatcttgacgaagtcgtcaaagttgatcttgccgtccttgtccgcgtcggccttcttgatcatctcctgacacgctgcaatgtcaaagtgctggcccagaagcgccttcagatcctccttcgtgatggcgccacggtgagagcgatccaatacgtggaaggcagaaagcagcagctcctcatccgccgcgtcttcggggctcaaagtagcggcaatgaactcgaggaggttgatgccgttctcgttctgctggtcgagcgcggtggcgatcttctccatgtcaagctggaagcgcatgagagctggcgccatgtacagctcctggagtgtcaactcgccgttgtgggccacgttgagctcgttgtacacagctgcgtgaagggaaactcgcgccgacgacatgcagaatgccacagctacaagagctgctcgctggaaaggcgtgtagttgcagaaagctttcacgcgcggaatgaactcgtcgtacacttcaggtaagatggtcttctcgttggacttgatccacgggtgagcgaggacctccgcggcggtgaaacgatctgtcggtgtcgtctgcatacagagggaaggatactaacgtcagttaatgggccacgtgcaaaggtagaggtttcctatcacgtacgtgaaggagcttgtggagcattgccttggcttctggagagactgcatcccattccttgccagcgtaagagacttcgcctgcgaagatgctctcgacgagttcgtcctcggtgtcgccgtagaacggggccttgttgcttaaaagcatgtactgaatcggcgcacaaccccatcgccgtcagcaactactcagcgtgatagagaacactcgcttcagcttaccatgatcacacccaggctccacatatcacatgactccctgtagttgccctcgagcacttccggctgaaacaaccacacgaattaattaatccatcggaatcaacagaaagtctgagcagaacgggagactacttacagccatgtacacaaccgagcccagaaccttccgcatactagctcccatcttgtagagagtgctggcgccaaaactgcaggaacgagatattagaaagtgagctcgactgacacgtaacgcgctggaattgaaagaggtggagtgtcgtactcgcaaagtttgatgtggccaccgttgtccaaagtttcaaccaagatgttctcgagcttcaggtcgcggtgctgcaacaagaaccagtgtgagttttggttttacctgattgaacttggtgacaggccacgatatggtacttacgcaaatgttgcgcgagtgcaagtactgaatgaccgacgccaagttccgcgtgatgtccttcacttcgtcctccgggaactccttgccgcgagctttcacgcggtccagtagctgaaacaaatcgtcacccagttataaccagtcgaacaccaacatcttatcgtcaaggtcgggcgagtgcgtaccgtgccgccagggctgagctccatgatgatgtagaagtggtggtcgtcctcgaaagtctcgagcatgcgcacgatgttcgggtggtgcaggactcgcaggatgtccatctcccgctcgaattcgtggcgcttgctgccagactcgaacctcacggtcttcatcgcgtagtgcttgtgggtcttgaggtgctcgaccttctcgacgacaccgaaggctcctctgcccagctcaccgaggttgcgatacacgtccatccacggcgtcttgtggtgcatgcagagctttgtctggaacatgttgggacggatcgcttcggacgactgcgcgcagcccatggttgcttctcaacgctttggtgctttggggggtttcagtgttcggtgtttctgcttctggagaaacttgacaatgaccagccttcaggttcctcacaagcgggggaggtctcagaatagcagcttcgcgtgtctagttcaaaccgcatcgcatcgcagacccgacacttcgcacagccaagaaagctgcttggtacgccaagaggaatagcggagacggagataataaggcaaccataaaacgctcgagggttctacttgggtaatatggcggcggctgatgcagcggggacgatacgtcttatcactgaaggtttcacacgaacactcgcatctcgacctacacacagtcaaatttaacacatggacatgccactacaatttgcttttagtcgaatactcacctcattcaacgccgttgagggctcccgattatggtatttttatttatggatggtccatctgactcataaataatggcatcaaccctacaagtcagatgcataaataatgtaatgtcgacaatgatcataaacaattatttctcgaattttagactgaacttaactctctttttgtattgaagactctacatttagagaaatattttcaaggaacagttatttctaggccatcccgacataaataatttatggatgagcccaaccgactgccataaataatcaataacaaaatattgacattattgtttttaccatgccataatcgggagccctgttgaatcaacggtaccagggcaattgaattttagtcgttgacagtcgcaccaggtacctcggagttgctctgatcgcctcagacctttcatagtgtcaggaatttttgcagtagcttggagagttggtgctgttgcgcgttctcaactagtcgcagagagtttggtattggtgttccccccgatatccttggtacattattcgcagatcgaatagttggcaaaggtacagccttctccgaaagcttagagaatggcgtgcattgctcccacgtgcgaaagccaaagcgcacttcctcgacttgtgtcacgatctcgatgaatgcagccttgtcgatctcctctttatcacgcgacgcgcccgagtagaacttgaaaaacgctcgtagcacctcctcatgctggtagcaaaacaaagggccgtataaggtgctgagagcgctgcaaaatcctgcttggaagtccattacgtgcttgcgaatacgattcgagggcttgtagatccgtagcccccacttctggaacgcctcctctacggccataagtcccgtagctggtgccacgacgcggttgtacttcatcacagtcgcttgtcccgccataagcggggagaatttccatttgttgcgtagttggcggcacaagtggtggaagtagtggctgaccaagcgtagctgcagggcatcggcgtacgtcaagtaggaagcgattgactctgcacaatgaacggggacggcttcaaactgacccacgcgcacgcgcttctccgtgggaaacgctgccaccaagcagctcgccacgtcacgtgatggatcgacctgaacttcttcggtgcgagccccagtggtgggcgtttggcttgacttgcgcgtcttgcttagtgtcgatctcgcaacgacgaccagcatgttcgagcacacagtcatcgcagtcgggctgcttgactggaacaattgagctgtgttgacaacgtgaagacatgcaccgacatccgagaagaccagaagctttcgcctcccagcgtcgcaagcgatgacctctccgtggagtcccatgacaatatccgacagtttgtcgaagatcgagtagactacaggcctcagctctgtaaaatccgttccttcgggcatagtgctgaggtctggcgctggcccacgccgacttccccactccaagagaggtttgcccgccgtggagaaccgctggatgcgtttgttaccttcatcgcacacaaacagatcgccgaaagcattgacagcgagcgcacaggggtcaacgagatcgcccagcttccaaccgtatcgacccacaacctgtacaacgatcccagtgaacgtcatgacctgaatacggtggttaccggaatccacaacggcgatataccctcgcggggtgaacttcacgtccgcgatggcccgaaactcgccacgcgcagtgcccgaccgcccgatcacgtgctccaagtcgccactgcccgagaagatctggacgcggttgagtttcccgtccgctacggcgatttctcctctcatgttcacagccaccgcaacggggctaaggaactgtcctggcgtcgacccgcgactgccaatggccatcatattcccgtccgcttcgctgtttaacgtcatttgaagctgacctttgtcgtcggggttgaatgcagcgccataactgcgaacgcagcatttaaccatgtcgcacgccagcaagcacctggtcaacgggttccaacaaactccgcgcgacgacggtacgctgcactcagccccgccaaacagcgtcttcttcacgataacaccgcctcgctccagagttctgtagtctcgaccacagatcggctttaccttcaactccattggacttggttgataattgataaagttagtttatttctgctggttggcatgggatgcggcctcaagcttctagttcccgaccgtctgagtggagctgcacgctgtcatacgccgctgccgtgctctttcgggagataaaaccaagatatactgacagcacgaggatgcagacagcgcagagtaccatgttgaccaggaagagcagcggccacgacgccaacaaactcggcaggaacggcagcaccatgcgcgcgatagacgcagaggcgccgaagacccccatgagcagaccctgaggcctcgagccaaggaccttcgagaacgctgacacgaccaccgcggatgctagcggacagccgatactccacacgaacacctcagcggccacgaagatgttgaactgctgctgggaatgggcctcgtcgatgtcgtcgctgcgttcgttgatgacgtgcatgtccgcgcacagcgtgagcaatatcgcgttgcctaccagcagcatcgcgaagccgaagatgaggaagccgacgtcggagattttcttgcgcaaaatctgcactgatccgtaagagatcagtccgaggaggccgaccatgaggtagaacgtggaagcgtcttgcgtcgcctggaccgagtcttgctctgctgctgtgttgcggttcgtcatctccagaaagagcggcacgttcaccgtctcgaagatggagaggatgcctcgcgcgttaaagttcaggaagataaacaccagcatgccgaccgtcacggcgcggtcgggcagagcgggcccagaacttggcgcagccgtcgctttttcgtcatctttctcatccacagctattgtcagcaccttctcggccggtttagtggtagctggcgacggagctgcagtcgcagtgggggattccggtgcgtcgtcgcgagtaaccgagtcatcgtagatgatgttgttgaagacgatcgtgatgaggttcagcgcgaccagcagaaatcccggggcggtgaagcggttgaactgcagcaggtcgcccgcaatcttcacctgtgcgtctccaacgacgctgcccagccccggcgtcagcgcgtacgctaggaacaccactgtcgcaaacagcgtgaagtactgcaagcgctgatccaccctcgtaagcatggcgatgttcgctcggcagacgctgcggttgccggcaccaaacccaataacaaagcgactcaacgccaacagcgttctgctgtgcaccgacgcgctgtacggcagcacgtacatcagattccccaccactgcgcagcaccccgccacgttgtacagcacgcggaaggacgtgcggtcgcagagccacccgaacagcagcgacgagaagaaccgtcccacgctgaagagcgccgtgagcagcgcgatgtcctccagccccccgccgagctcctgcacgtacgtgaacagcgtcggcagcaccagcccgcgcgccgcctccgccccgaactcggacaggtggatcagcaccatgtgcgcgtaccaggaccgcactcgccgtcgtcgatcgccatcaccccgagctgctggcagctccaactctttcttcactctatccgccgactctgcatcaattgagaccgtcgatgcagcagctattgcgcccatggctgcaactttgtcaagtggccacggcgtgccatgatggcgatcgtccagcaggagcttcacgctgcgtttgacaccccaaagacgtacagtgcatgtcaaaagttcagccccctagtcccactcctcagattttaatccaatcatgtcgcaggcccatcctcttctgcatcccatcagattccacgccagtcagtcattcgtgaacggaccccccctccggaaggacgcaacagtgggtaattcccaaaatacggagtgctggggaaacttttgacattttcaaccttttgcgaccaaacacggagttgtgggaaaacttattcccgagaccagcctatagaatcgtagaggtagccttcactgcagaaaacaccagagactcaagagcccacgtgctggtgcacgccgctaatgcacgtcgaaatcggccattgctatcccattcagactcagtgatagaagtgggattctttgttgtccacgtagacagcagagaacgtaggcggtgaaatccgtcctccacagtcccaaacagatcgtcaagaatcaactgcttgccacggtaggtctccttcaaaggtatgtccgcgcccgatagggccttcacctgatccacaatcgtgcgccccgacacattagggtccgatgccaccaatgtacgaatcgattccatagatcgcagttgcgatgccgcaattttagaccggccgctgcacatgttgtgttcaaggttgcatttgctaatgcgataaccccgctgagaattggactgtgcacggcacgcagcaacctcaaaacgacagaggtcatctcctttgcactggtagcgaaggtaggctcctccagcagcagttggatccagacgcacagatttccctgtacttgaggcaaaagacttaattgccttggtacaagcacgttgagaaccaaaccactggccgaccgatatgaaggatgtatcacctgcactgttcacaccttcaacaccttccatcgccgggaaaacaacccgagctaccctcagacgatttcacctttttgcgttttgaaaacaatggcaaagtgacttgaacactggacatttctagaaatggaattgctatatttacctacacgcacggttgtgccctcgatgtaccacagctcggccacgggcgtcccgcgcttcacgcacttggtgtacagcagcttgaccgtgcccttggtcttcggtagctcgtccacgggggccatggtcttcgggtccagcagctcggccaccgtcgtcgggccctgcacgcccttgggcttcggcagctcgtccacggggccatggtcttcgggtccagcacgtccttggtctccagcagctcgccctcggtgtccagcgtgcctacaatggccacggaaatcgtcttcaccacgccctttgtctcctgcagccaccagcgtcttggtggccagtagctcgcccagggaggccacggtcggcgagtccagcgagatcagcagctcgcccacggtcgtcgggcgctggtggccagcagcgagccattggtggccagcagctcgcccagggaggccacggttggcgagtccagcgagtccctggtgtcagtgtccgggccgaggttcgagcgcaccacgccctcctactgcagcagcacggtcgtggacagcaaggcaccggagggtgtgccgtccatgatggcggcgactgccagcgtcttctccagcggcgcgtccggagcggcgtgcaccagcacgtgggctcttgagtctctggtgttttctgcagtgaaggctacctctacgattctataggctggtcttgggaataagttttcccacaactccgtgtttggtcgcaaaggttgaaaatgtcaaaagtttcccagcactccgtattttgggaattacctcgcaacagcaccaatatggactgcacgtcgccgtcgatgctgatcggggccaactggcccaaggaggtcctggagcacccgctgtcgctggacggcgacgcgttctcgctctcgtccgccgccgagttcagtcacctggaccaccgcaatggcgcgcgcaacgtgtacaagttcggcggcacgtccgtgggcagccccgcgcggctctgcggcctcgtgcgcatcgtgcgcagcgagcgcgagcgcgtgctggccgtcgtggtgtccgccatgggccacacgaccgactacctgctggaggccgtggcgtttgccgccaagggggacgccgagaacgcgctcaaggtcgtggacaagctgcaggcgctgacgctcacgaacgcccacgacacacagaaggagctggaggtggagcacgtggaggacatgaccgacatcatcgttgagcactttaagccgctgcgcgagctgctgttcggtatttgcttgctgcaggagcagacggctgcggccacggacaccgtgctgtccttcggcgagcgcatcagcgccacgattgtggccaagctactaaccaaggccggcgtggaggccttctacctggacgccagggagtggctcaccacagacgacacccacggctgcgccaaggtgttcttcgacgagtccaaggagaagctgcagcagttggcggcgcagtggaagcccaacacgctgccggtgatcacgggcttcatcgcgcgcacacgcagcggccgcaccacgacgctgggacgtaacggatccgactacactgctacgctggtggggtcttcgctcggcgccgactacgtgctgatcaacacagacatctccggtgttatgactgcggacccgcggatcgtggaccgcgcagtggcgctctcccacttgaaccaccacgaggctctggagctcgcggtgtacggcacgcgcatgttccacgcgcgcacgatggtgccgctgattaagggcgatgtgaccatgctcatccgcaacacaatggaccccaacggccacggtacgtacatcagcggcgtcggccgctcaggcacgcgcgagacgtgcaccacgtcgctggagaacctggcgatcatcgaggcgcgcacgcgcatcctgcaggacggcagcagcgaccctcaccagcaggagaacatcggtgcacgcgtgacgaaggtgctggaggagctcaagatccccgtgtggctgtcgatccgcggcgctcacggccaggccatcagtgtcgtggtgcctcgcagcgctgaagaacaggcgtgcgcagccatcaacgccgagctgagcgctgagatcgagtcgcacgaggtggaccctctgaactccgagtcacctgtgactatgctttccgtcgtggccgaagacttgtccaaggttccttacaaccagaccaagttcttcggagccctcgctgacgctggcattgaagtgcaggccgtcggtcagggcactagctcacgatcgctgagctgtgtcatccgcggcgccgacaccaaggtggctgtgcgtcgcgtgcacgacgcctttaacgtggactacctcgtcaccaacatcgtcctgctgggctgcaaccacatcacgctgggcgtggtgcgccagctccagaagcagcaggagctgtaccgcttccagcacaaggcgcgcgtcaacatcgtcggcttcggctccaactgctgcgacttcatgtacaaccccaagggcttcacgttcgaggagctcatcgcacggctggaaaactgcaagagcgacaacgccgtggtgtctgcggcttccccatccagtgcagcagctcagtacgctggcgcgccgtcgctcgagcagctggatcaactgcaggatctagccatccctatcctcgtcgactgctccggccaggccaacaccaaggacctctactcagtgtgcatcgagcgcggcatccacgtcgtggcttccaacgcgcgctcggtgagcagtcttccgcctacgtcgtcgcgcgagagtgtggccaccacgcgctccaagactgggcgtacgttcttcatgtacacgtccactatcggcgccagtctgccggtggtcgacacgctcggcaacatcctgcgcactggtgaccgcgtactgagcatcgagacgtcactcagcggctcgatgaactacgtcgccaacaaagtcatgaagggcaaaaagctatcggaggcggtgggtgaggtgctacgcaagggctactgcgagcgcgacccgcgcgaggacttcatgggtacggacatggtctccaagatcgtggtactggcgcgcgctctcggcgtgcacatcaacccgagcgccgttcgactggagccgctgatcccgcacagtgtgcttgatactatctcgtggtcgagcgagatggaggtggaggacatcgtctccggcctcgaggcgcacgacgaagccttccgggacaagtactacgtgcccgcagtggcagagaacaagcgtctgcactacgtcgcctccatcgacctggccaagttcccgtccatccaggccaagatccagcccgtgctcgttgacgaggaccacccggcctactacaccaaggacaacgagatcgccttcggcttctcctccgtgcagtaccccaacccgctggtgctcaagggctccggcaccggtgccgctgctagcgccaccggcgtcctccgcgacgtgctcacgatcctcaactcgctcaacggcaagaacgtccacgtctaaagagacgacgcggatgaatggagtgcagtatgactgcaagctgcttgttcatttcaagtggcaccttccaccgaccgactcgggacacacttcgggtgcgctcggcgtgaagggctttcgtattccattccaaccaatgtgcatataaactactaatacatgtacaccgatgcttgtagcagcgtgccaagcaacaaaggattccgagttggaacgcaacgtggttgattgattgttgaaacttttaggtgaacgcagatcgacttccgactcctacgtcttcactgtcgatggcatgcctaagccgacgtgggggcaacagcaggagacatcctggccgtcattggggccgtcgcgtaaatcggcgccatcgggatagcaggaccagcagctggagccgtgccggccttcgccgccactgccgccgggaacaccgcacccagtagactcgttgcgtgactagtcatcgcacccacgtcgccgctggttgccgccttgaggaaacccgaagcgtgcgtgagcaccgccgggttcgagacgagacccgacagcgtcttgaagaagtcctccgtcgacatggcggcgatggccggatccaccgcgctggggttgctcgaaatcacctccttgatcttcttggccagctgcatgcgctcgtcggcggacatcgcggcgtccatggtcgtcggttggttggccgcaaagacgaacgacacgaggcagaccagcgccagagcgatcgcgacaatggacatcttcatggtggtggtcgcggagagggggtcggcttgggtgcttggagtccgaaagaggaatgagcctcagcatgctcgcttccgacgataagttatcgtcgataacgagatcgaggaaaacccggagaactgtcagcgtggaaatccccatgtgctctcgaggataaatcctaacggtccatgacgagtactctctcggaagagacccccatgagcaatagcatcaactctgtgcattttgataacgtcagtgttgctaacgtacaaatgaatgcttggatgagcgagtcgatgtaaagtaccgatggaaagcttcccattctactgcgccctctcttttggtgcctccacagcgaagttttggcaacgtggaaacattcttgcgcctgctttgttactgtaattggcatcaaccgatggacttcacttacctagcaagaacaaaaactgcatccgcttttgacgttggaaacgctaatgtcgattaaagggttaagagttaaaatgaacgcattccatcggtttggactccgatcttcaggactgcgcgagccgttcagacatcttcagcacgatcacggtaagctgggacaacttcaccagcacacacattgaagcttggtcggcgcttacgacgcaggcgcagcagccatgggaaccgcagcagcagcacccgcaggggcgaaagccgataccgcagcaggaagcgccgcgcccagcagtcccgtcgcagaagtggccaccccaccaatgtcgccgctcgtcgccgccttgacgagattcccgacattggagagcaccgacgggttcgagatgaggcccgacagcataccgaagaggtcctccgtcgacatggcggcgacagccgtatccaccgagcccgggttgcgggccatgagctccttgagctgcttggcgacctgcatgcgctcgtccggggacgtcatgatgctcggttggttggccgcaaagacgaacgacacgaggcagaccagcgccagagcgatcgcgacaatggacatcttcatggtgagaagcggggaaatcggggtagcggcgatcggcttgagtgcttgggctcagttctcgaacagctcgatcgaccagagtccaaatgaacaatgagagcggaatgagcctcactctttgcggctagtcccagctcctaacgggattgaggaaaaaagaaaagctcaggataaatcctgagtgtcaggttcaagtgcgttagaaccccacgctctgcgccctctacgcacgcactacaacagttttctcgcaacgtgagctgcccaaacttgggcaaaacgaaacttcaaaatgtttggtgcctcggtcgatggattagaacaaactgccttcttgtaaatgtgccttactgcctacagcaacaacaaccaatgctcacggatgcgattcgaacgctttgaacaaacttcctggaaggaaagcctcaatttttccgagttcaaaggaaatcgcttcgattgagatgattaggataaacgcaagctttcggcttggacttcaatcccccgcttgggtgacttgcacagcgcgccgacagcacccgctgaatggatttacgacgacggggacgcaggagcacccatattagacggcaagcccccgatgcccgcggtgttgtacggagaagttcccatcgtcccagacatggggggaatgtagcgcgtcgggttgttgacgtcgtagcgagtcggcaacggagtaggcgccatcaccgccgggtaagctgcagcgatagcaccaatcgcgtgcccagtagccgcagccgggttgcgcgtcatagccgagtagatgctactcaccacgttggagatcaccgcagggttcgacacgacggcccccgtcgtaccgctggtgtcgggctcgagttgctcgaggaccagctcagcagcggcccggttcgcctccgggtgagttgccagcatctccttgataacatcggcgatctgcacgcggtcgctcttggtcaggcggatgttgctcttgctcacgaccaccttgttgttcttggcgtcgatcgagttggtgatgaccccggcaggcacgacgaccgacgtaccgcggagaccgggggtcatcgcctggttggaggtcatcatgccaaaatccatggtggtcgggtgatcggcagccacggacgacacgaggcaggcgagtgcagcagcgatcgcagcaatcttcatcgtagcttggtacgtggagcgaggagtagcgacttgagtcttcgtgtccaattgaacaatgagagagagagagagagggagtggtgaggagtgagttctaccgcaataatcgaggaaaacagagagaaatttgagtggaaatctcttgacgataaatcttagccttcaagttcaagtgcgccaggctttcctttagtctaggagataattgatccggtcgagtcgtagcgtggtggggaggtcttgtcgacgaggagctgctttcagcttgatgaggaactgcagggcttccacccagtcgctgcgcttcgttttcttcacttccgggctctctccatcggcaatctgaaacacaaagcacgacaatacatgtagcgtgagtattaggcactccaccaccattatgccaaactacagcacccacctcgagatccaatgttcggttctcttcgtattcgaccgaaaagcagtgaggagctcgcgctggttgcttcgcacggtcaaacactcgcgtgtcttgaccgatgcacacccgcacaatcgaccgcgtggggatagtcgcttttggtacagagctgttcaccttccggtagttgaggtattccaggtcagccgagcaccatacaaagcgcacgtgcggcctcccatatcgtccgtacttgacgaacaagctcccattgcgtaagagttccatcctcttacggatcaagtcgctgccagacttgcgcggaggcgcaacggggtttttcaccccgtcagtggtcaaagcagcacctcgaagggtagtagccttctcatcagtagactgatcttcctccgagatgcttggattgctgtactctgaccgcttagaacttttcccatttcgtgacgaagactcgagctttgaggctggaggttgaagacgtgaagccgagggtcggtcgtattcgtgactctccgatgcctcgctgtcattttcactatcgcttccgctgttggacggatcgcgatctcccgagctcccacctctcgcactagctgacgatcgcctgtgcgacggctgacgcttacgcagcgctccagtgtgagactttgaccgcgggatggaagtcttcggttcgccctcgaatcgttgggcctctgcaacgctctgaatctgttccttcagtagctcagcctcgcgcttttgctccagcaaccgctgttccagtgcctcgacagtccgtgtctgcttgctcatgagctcctgcaattctgcggcagtgttcgaagcgaaaaaggtgttttccttgaggactacgagacaaccgagcgctgtagccatccccaactctcggattccttgagcgacggcctcgtacagtagtcgcgcttcctcgaattcgcctacactgcggggtttatccagctcctcacgtggcagatctcctgtgagcagcagtctctccacgatctcctcgcactgcatccagtccacccttctgccagtttggtcggaccgatctcgagcactttttgcggctgctattgccgcctgcgtctcttcttgagccaacgtcagacgtcgctcccattgctcctcctgcttagcgaagtgaagagcttgtgccttcaagtcgttttcaagctgcacggcgcgagcctgcagctcgaagttcgtggcttccagctccgcgttgagtttttccactgcctctagacgcttctcagtgtccacttcactgttgactgcgatatcgaccgccacttcggagcagcgctgcataaagcgacaagtcgagatggactcgtctataaagtcgttctcagggttcagcgtcgcgatgaagacggacttgcaattgccaccgagactgcctcgtaagaccgacgtgagcatcgagttgcggtacggaatatggtacgttcgtgagacggtgttgcgtttgcttcgtagcgataggatcacctacaaatgtacaaagattataaggtgaatttcatatgttgggcaagctatcacactaaaagtgtacctgttccaagtgatgaagagagaggttgatgtgttttccctctgagcgcatacgctgcgtgccatcgcgtttgtagacgcgctcggagcctgcaagatcgaccaggtgaagcttcgacgtcacaatcatatccgaatcaacaggccgggactcgatcatgacactgaagatggaatgcgagcgggatgaagcctaaatacagaatttaccaggcttcagcagaagggagatgccgtgaataaactgctgttagtgtacctggttcatgggggtgtcactcgtgacgcggttcatgttgccaaggaagagcagatttagcgcttcttcctcggagactgcttcaaaaacactagaaagcgagtcagatgctaatggtacatctcaccccaccactatcaccacgaattacagatagtgggcttaccccaaatttctgaagtgcatatctccttcgtcatcgtccatgagtagaactttcgtccactcctcgattggtcggtcagtatgtgatctacacgcattatggttcaactttagtacgaactcgcattgaaaggtggaaaatggtcggtaaaacttaccggtcgagcaagtcgtagacgttttcgttgtagatttcgaggtacgaaatgtaacacgagtagcgcatgttgggtctcttctcaaactcctcaaaaatcgtcgagagcacgcgagggatgattcctctgtctgcataatgctcgcctcctgtaatcgtgtacgttttacccgagccagtctgtccataggcgaggatggttccgttgtagccatccaaagcactatacacgatgtcctgcatttcccaccaccaacagtatctatcaccataaagcctcatatcttgatgttgactttcatacgtaccaggcagacttcgttgaacacttgttcttgcgagatacttgggtcaaacacgtcgttgaagtggaagtcgagtccgtcgcgctgtttgaggtgcattcgagaatcgtcgtcgtctgaaggcgggaacgctatgacagtcctgctgaaccgaccgtcgtctactcggtctaataggagagcagcaaaacattaggaatactttacaccagtaagtacaactaaaacgagaagaagtgtaccgagatcgaacttggcacagtcatgtccacgtcgaggaggacgcagacgtgcgtaggtgccaatgtgccacttcaccatcggccttcagcacctcagcgagctgcgctattgccccttttgccgacttgatagaggacgccaaccaggtgcaggtcgtttccaagtttagttgagactgatttgagcatcaaaaagggaagagggggtaattttagttgatacgctttacctggaatctcgacttagaactacacgaagagcttagtctatgttggtacactagtatgcgatggtaagagcgcggtgaacttcctcgtcggcaatgacctggataatttaacacgagtgagtgagatggggccaaaagggagccttcaaaaagcttgatcaacacctacctggctgaagtcgctgaacaacactccacttatacccgctttcgtttgcttcatgaacggtgccagctgaatctccaagtcccgaaagattgccttctgcctagcggcgttcgaccgcgacaccatcgaaatcaccctcaaaaagtcatcaacagtcgcgcaccctttgttatcgaggtcgtagacgtcgaaaagcactattcatacgcaagcaccgaccacaccaaaaagagccatgagcccccctccaacaccgcgaaagagtaaattacttccctcgggctgattgatgtgcaggctggaacgaaccttgtcgcttgagtccaagtgtctgcttgacactaaacaccgccagaagcgtcacaaatgcgctgatgctcaccaaaacgtcggcagtatctgcattcttcgaccttcccacttcaatcccctgtcgctgtaaaaccaacagagctacgagcggtacgaacggttgcgctcgcaactccggcatctgaagcaccaccttgagcggcagtctcagctctcgactcgtatcatccgccggtatcagctgcacgaatctcttcttaagccgtccgagttcctgccgcgagactacaaactcatcgtgagcattctaccaagttgaacgaagccccccccccaccttctttacttacacggctgcagcagcccagatggatacttcagcaacacctccccactctccagcagcgccaacctctcccgaactgtcagtggcttcaccacagcctcaccccctccacccgaagctttacgccgtccaaacatgccacgttctgctcaacatgagtgcaacagcttcaacttgcgcgtcgcttcgcgtccagctccctcattggctgaaatctaaaaataaccttcactcacgtaaaattccgccgattgacatggtatccattcagtcttcaatttaccggatacccctcactacaccttactccgctctacccccttccatggccgactccaagccgctgttcgtcgtgcaccgcggctcgtgccattgcaaggccgtgcagttcgaattcgacgcccccagcgacctggtgcagaccgaatgcaactgttccatctgcagtatgaagcgcaacgcccacgcgatcgtgcccacgtcgcggttccgcctgctgcagggccaagaaaacctcacgctctacacgttcaacacgcaccaggcccagcacctcttctgcaaaacgtgcggcgtgcaggccttctacatcccgcgcagcaacccggacggctacgcggtcaccgtcgcctgcgtggacccggccaccatcacgagcgtcacgaccgaaagcttcgacggccagaactgggaggcatcatttgaggcatcgaacatcgccagctactccaaggaataagggggctagtgactgagttttcaacttcgatacggaggtttagtacgttagtacgagttgaaaatgcagatatcctgccgtgctatcatacgcttgccaattcacttgaccaatggcgccgactcgagcggggattttaaccacgtcgggcaaggtgatcaagttcgatgcgccaagtcggacgtgtgtgacgttctcgtcgtgtagtggttgggaagcagctgagaagctgttgtatgcgcgcgtgccggacggacagagcgtcgctttcttccgggaggaagactgtgcaggcaactttgtcttcaacagcgacgtggggaaagccttcgggaatgaaattgtcaagggcgacaaggcggtcgtgcggtcgttcatattggcgaagtacacgacgtacccagtgaaggggatcgtcagcatgtgccgagacgaaagtgcattggtgttgaaggcgacggagggaagtgacgacgacatggagtggacgatgagctcgagtgcgactaacggtggaaatctatcgacaaattggtttgaccctctctcggagggaggtattgcagttggtgacgcttgatcgagtactccctacagacaacgtgacaaattagtttacactatgcaatataattcttttatgtttccctttaggtgacgactacgcattagagacatttcgcagcagggattatattcccattcccgcacaaagcaacaaaaaacgggctccaccagccctcggtagagaattagagttaaggtgcttgaccagtttaccgcaatgtttgactttttccgcggaaaaatggtcataactttttttctagacatcctctcagaaatttaaaaatatgccgcaaatctacagaaactcgcctataacatggtgatcttgtcgtggttctagtgttttgcaagcgagctacctgcatcaaggcgaagtgggtcctccgacgttaactagacctaacctcagctcaataacgttgcaataacaagaataacgtcgcccaaaaaataaatgacgcgtaaaatacgtgacaaccaaatccctcattcaggccggattttccctcaggattaaaatactcatttgaagtgagggtttacctcgattaatttcgaacttaaacggaaagaagctgtactttaggaaaagagggagaatctcagccctccatttcagaaaaccagctcggacctcctggaaacattacgatagccctacgcgcccgctgttaaagggtggggcaagccaagcgacttcacgaattacgtaagtttgaccttgcttcttacaggtgtgcattaatgttgcttgttatatgtgcattaactttggtaatttgttattgtttatttggtaatgtattaaggctgttaaggaggcggcaaaagcggcaggatgcctcgtacgggcaagctgaacgcattggcatcggagatggtcaagctgcgagagtctgccccccccctcccgcgaatactaaaggtaacgttgctctgcgctctattgtctgctaatgctgctctatgattgataacactacttcattaatatttatgtctctatgttgttttgacgttggtattcagcttcaagccgcgggacgacaaggacatgcgggccgagagggaagtccacatctagcagagtaccgatgttaccaaaccactatcatcgtccaggtccctgacataatggctgctgcttcgcgttgcttgtaattatgttctgtaatttccgtacacctatacgattgtcgtcctaaacgtttgcgaagcatttgcgcccaagcgcttaggtttaatcgaatgaggtcgacactatacgaaatatcgctgagtactaacgttgcttctcaataacgttgcattatgattagcgttgccccttggcccttgtggtgaaaaacgtacgcactttggtgaagagcgtacagattttggctcttcctgtaacacattgcgcgttttctgcaatgggggatgcttcgtcatacaaaccccaatatgtttcgctgcgctaaactggccggcgctcgtcaaagcttcctggtctttccttgatgcaggtagctcgcttgcaaaacactagaaccacgacaagttcaccttgtcagaggcgagtttctgtagatttgcggcatatttttaaatttctgagaggatgtctagaaaaaagttatgaccatttttccgccgaaaaagtcaaacattgcggtaaactggtcgagcaccttacagaattggtggctttgaagaaaactgtcctcacaacgagatcagcaagctaacaaccatgggcccgaagcggcgcaatttctccgcggaggaggacctcgcacttcttcgccaggcgctgagcaatcgcccttttctaaaggaacgaggcaagacaatggctgcatgggacgctcttgccgctcagctggtaagtgatgcaaacttctctcgtagggcactccctaagatcagcccctactacgctttttgacaaaactttagtccgacacaaatttacatttgtgaattacaatcttgacctaaactgggtagtgtttgcggatgccctgcacgaggccgtcaaggtactggcacttcgggacagtgccgttgaagtaccaggacttccacaggtacatgtctaggtactggtccaggcgctccttggggacgccgcgcatagccttgatgtagcgcttcacgcgcacttcccacgtcccttcaatgcggttcgtatgggcccccgtcttggggtcaccgaagaacttgtcgtggttgacccacttgtgggtgtagttcttgccctttagccacttgttgttctccaacgtatgcttcccgttgacagaaacatacgaggagtactggtcggagatgatggtcgacccggccatgatatgcttgccgatgagaggagacagcgtcttctttttgcggtcggggtcggtgatgatgccgaaccaccgccccgtggcccgatcgacaccgccgaagagccagtagtcctcgtgctgcttgccgcgcccgaacttggacttcttctttaggctcgtctcgtcgatctcgacggtgtggcccacgccgccgatctgtataaacatagttagcacatatgccacatattgtagtcgaatattaggtgtacataccatcatgctgcactgcagcatctcggcggagcagatgtcgcggcagaagccgtaccagtcgatcgccgtgacgtcggagatgcccaggaactgctccgcggttccgacggggatgtccgacgcccagaagaacatcaggcgcagcacaatgcggtacgctagcttggtgccgtcgaagaaggagcctttcttcaggctgagctccttgtccgggtggccgctacggcggcatcgccagcggcggtcctcgtcctccgtgccgcgtttgtacacgcacaggttcatgggatagtcgcagtactcgcatgtcttagaggaggcgaggaggccgtgacgcattaggaagctcacggccgtgtcctcgctcgtggtcgccgccattatgttgtcgaacgtgaacgaggacaccgccggatccgccaccgcgtacgcgtacggcgagttgtacacgacgggctccttgggcgcggtgttgggcggcgctctggatgcgcgcacgcgctccgaccgtgacgcgcgcttgcgtggcgcgcgtgcagagcgcggagccgtcttcgaggatgatttcttggctggggccatggtgcgttgcgtgtcttggggcgggggcactttttcgaaagtgatagtgtttgggttgtggcggcatcgccgtgggcgcgaaaagtgggggcgctcctcgggttcacacgagtacgcgcgcaacgcaaacttatacatgggtgcacttaatatgtaatttgtgtcggactaaagttttgtcaaaaagcgtagtgggggctgatcttagggagtgcctctcgtggcaagctgagcggcaagacggctcaagcgcgtttcgacaagctggtgacgcagaaacgtcagcagaatgctgctgcgttagctgcgtctggcgtcgacgaagaagaaacggagaaggacgtcttgctggacgagcttattgctctcatcgatgaccatatcgaagccgtggctgccgagaacgacaccgccaagcgcaagcgcgatgcagatgaggaggcgtcactaacggctcgccgcctagctatggagagcctgtcagccggcgatcctcctaagaaaaagaacaaagaggacgagatgaaggagttcctgttggaactgaagaggatggaggccaaggagcagaatgagcgttgggagcaacaagccgctacacgtgctcgtgagcgcgaagaagactgggctttctttttgaaactagctgaagtattcggaaaacactttagtaagccccaaaacaagtagtttgtattggtcgcttagtagctagctacttagatctagatactccgctagcgatggcggcttcaaataaaaatacttgctgatctcgttcccaccgtaatagcagcagtggcaatttgtgagcaacatgcacacatttactagcttaccaattgggctctggcgcagtttaagcttcttcttgtagtcaatatgcccactgtgtcttgagaatagaaaacttccactcgacggattcgcgaacggagctcatagctgcgttgaaggcttgctctccagctgtcaattgcgctttcttaaagcctgatacgatgaagcgctgtaccccgtatgcgggatcgccgtacagcaagaagtcgacaaagttggactctctagcctccaaatactctgtaagcttgatttcccttagtagtgtgatgtcgtgccgcttgccctcgatggacctccaaaagtggatggtcagtccatcggggacgaccacagcctggtagttcaggcagtgtactcgcttgtgccccgagtacacctgcttctgcaagttttcgcggtgcccgggcctcggagacgggcggcagatcgggttcttggtcccgtcaatgaaaccaaacacattgtgcattggcgcacccttgtcatggattgcttgcgcatatcgacgtatattcttgctgcaaacggtcttctgaaagtagatcagctctttgaagcgctcatacaaccagatcactagaacaaaaacacacctaacataaatagtcagataccttatacattacggcttttattaagtcgcgtaggtccaacaaagtatacgacgtactcaaatgagtgcaaatgcggctgatggcagcttccgagcggccaaacttggtcagaacatcgtagttccgtcgtgggtagcttgtgcgatagaggagtatgcatagtgcctctgtgcggtgcagcctgtcgcgataagcggtgatgacatactcaggtagcgcaaatagctccacgagctggtagatagccgctctctcgaacctaaagtccttgacgcagttgacatcagacttgctgctcaacacgaagcggattgaggggatgatggggcgctcggggcgctcacggtgctcgttgttcgctaacagcagcagcagagcagggccgacgtcgacagagctgcttgcagcagccagcacaacagtctccattgcgaggcaatatcgtgagtgccgcagcagccatccgatggacatatcatttttgaggggcaatgcttgtgggaaaagaattagagtgaaatgcgttgactagagttttcttcaccatttccacagagctctgtggggatgggaaatgcaaactgcgaaaactctctattctataataccatctacatgtacaaagtacatgactgtctgtcttgagttcggctggaacttagggggtagttgttgtggtcatagattttctaatttgcagcttcaaactattgactttccacttcccttttgccaagttttgaatttcgacgcgggagctcagctcccgcgtcgaaattctgtacctccgagctggaattctgactgtgggcttgttggtgagtgcttctacgatctcacttcctgcacagagaacacggaagcggaaatacccaacagcagcgagttcgagatgaatcctacctcttcttgccatagggcaccatcagtgggacgtgcctgcccagttgcaagtttgttgaacaatgaccgaggcagctccagctgcagggccgggtgcagtcgacataggtgcaacaaatacaattacaaatggaagtgcttccggtccggcgaaacgaggagtattgaggtatatcgagcggaagtggaccgatctacaagtcgaacgtcagggcgcgtactctatcgagcatctcgagagtctgaacttgtactgaaagaccacgtcacgcacgcgggttgttctggtatgcgtcctctatccacttccttcgctgctgatagctctggtggtggaatgtttgccgttgcggtcgccgtcagaagggtggagagcgaactgggtcttctggattcgtttgttgctggttagtgtcattgtcgggttcggcatcaactcgatgatggtccggtttattccgggtctcaacttcacagtcgccaagagattgacttgtgcaatcggttgtggtgtcttgttcgtggggacttgtattctggcggtgagtgagatagctttcccggtgccgcttatgatgcaaattggctcaatccccattgcattttactctctactcatgaatttgcttgttctggagtcagctttatttgcaaaggactcgcccttaaaaacccatgccgacaggtataatcgctttttcccgtcaatcatggcgctatgctatctacaagatgttgtatacgctcttaccagcaacatattgagttgtcaccattggcattttgccaatctggaagtttgcagccaaacacttaatcgtggtggctacgcgtgaactggaagattttattccggtgctggtggctttctctgtggatttctttagcacactgttcatctcagtctgtatgtccacctcaagatccgccattctcaatctatcgttcattgcagtggacttcgctcaatccctgatccagttccgcgccatgaaggcgaacggaatggaattgctgacgctccttaacgtacgccaacaaagaaaagagaatgggcttgagattactgatcttctaacgatactctttgacgcggtccgaaactcagcttcactcccgcctaaatcgctggaaaacgttcgaatgtgggcgtgtcttccctattcactgacgagtgaagggctcggtcgccttcatgctcttgatacagccgacatatacgcccaaaaggagaaagggcgtcaagcagtgagcttccgtcgtccccgctatcgaccagcacgcactgtcccggttgcaccgtctccagcaaccatttcagaggccattaacgaccacgcaagcatcggtcacaccgctaaccagaagaagaccgtggttcaaggtgttcaacttctctttcattccgaatatgtggttctagtccagtacattgagtgcatggtaccgctcatgtacttggcattcaagtgcacactacagaaccttccgaacgttgtattctatccgggtggtgctgggaattgggatgccacctcatgctaacatttttgtgcttcaagttaatcttttgctttttatcaacaagtttatgcagcgcaagtttgctctctccccgttgtatcagctagcgtatgtgctggagacggaggtttacgcgggacaacctcttcttatcggcttgatcctgcagtatgagctggaacatttcggtgggtatccttgcccctccttctctgctgcaggtgccgaccttactcttcgtttccaatggctcgaagcaaataaataacgagcaatcgctattgaaatgaccgccgacattggaccttcagcgtcaacctgaacgaatccagtgctaactgtatgtgtgtttacagtaacaagaagccaagctcgtgtggtcaataaaaaaatatgtatgccaccacaaactcaccacatcccacaacacgatgcgtacaaccccctatcatagcattctacctcctccatcacactcctctgtacgcttgggcctactggctccgtgcgctcaccgttgaggtccacccccccacatgtacttgtagatggacgaagcaccactagtgagggagcttgcgacggttgagacggtagcttcgactgcctccaccccgatcttgacagacgaacccacagaagtcatgcccttcgacactgtcttctcgtttgaatgcgcgtgaacaaagtcgctgagcttcataccgatgcgctcgtttaacttgccttccatccgcagcatcagcgcagtcgcagcctcgtcgtcggactgaccaggcaggaatcgctcgatcacaaaggcttcgaggtcgctctgcgtgtagttaacgccgaaatccgtgatctctggaagtgccttcaccaccagcgtcagcataatcatgaacagactcacgtgccgcctcaagcagttgaacgcaattacacagagctgcttgaactgctcgaactgctgcgtctgcgtgcctccgagtgcctcaatcatgtagtgatcaagccgcatcggaggctgcagcggcttcgggtccttgccaaggatgaagccgtagtcgatgtggaacaaaatgccgtccttcgtcagcatcacattgtcagcgtgacgatcaccaacgcccagcaggaatgtgatcacggtgtaagctgctagactctcccggaacgacgaggagatgtcgctgagggtgcggtgcccgttgtagtggtgcaggaagttcataattgtgccatggtcgcggatgatcgagtagagtgtgtgagcgttctccacaatctcgatgagtccgtcgaagctgctcgtcgggagcacgcggtaggtcaccaacggaatgtcgagtcgagtttcttgcttcaagatcagatacatgacgttgatgatgttctgaacgatcgagtctttccgaaggtcatcccgcttgtacatgaggcggtagtggggcagcttgtgcgtccgccggctccacgtattccgttgagattcagcagtaccatcagcagagtcttcgccctcttcagcgcgatcgacgcccgtgcacgtgatgatcatgggcgcctccgcgcttcgcttcacttcaatcttcttgtagttgataccacttatcttaacctgcggatccaccggcagacgcagaagaggccattcctgctccccgtttgcaaccgcttgaatagatccacctgacttcctctcgcccgtagatgcaccaagagacgacttcttgatcgacgcttgcaagatgcgtcgtacatcttcaacaggaatgcgcggcgggatcttccacatcaagtccaccaattcttggcctcgaagaagctgctctgcgacatcgtcattggcaaacttcctcgactcgaccatacgcccacccgatgacttgtccttaaactgcgcgagcgtgagtagtagtcgctgcttcataccgtcaaattttcgtcgacagcttgggtcctcagccatgaccgtaagaccccagtataaatcatagcagaagcggatgccacattgcgcttgtcggatcaatgactcccccagcttgcttccagcagcattagtctccacactcagactgtgcaacagcacctgcaagtagctccaccattcgttctccgtcgcagtcttcagcagcgcgtcaaccgccattgcgcgcagtcgattgttgcaaatggtttcatccgccaagatctccagggcatcgacactaccaatttgcggtttgcacagccgcgaacacatggtcagcatgcatttatgcttgcgttcttgctgcagcaactccatcacctcgtcgacaagctgcgagtttttctcccgccgtctccgcgccgcctgggggctttcaatgtcgcttgcagtcatgtccacaccgagatactctgcttcgttctcttccgaaaagtcgacggccttgacgagctgcagcagccacttggtatgtccacccaggaacttgcggttgataatcagcatcttcttctctcgctcggacagtcggtgggtaggcaggtagtactggatctgccggaacatcgacagacacatgatggtcgcgcggtgccatttgcgacacacttggcccagcgtccgcagttcttgcaggtcgaactcgcacaactcgaacaccttgaccgtgttgtagtgatgccctcgctgctgcagcgcacacgcgcagtcgtcacacacgcgctgcatcacgctgccatcgggtacgggcatcgacctgtgggagctcggcgccgtcaacgccccactgctcgacagcgacgacgaggcactgcccgacctggatcgattcggcgtgaacttgctgatgacgttgttctcctgcagcctctgtacgtccttcaagaacttctcctgctgctcctcgggcgtgagtctcaaggacacggagtccgagaacgactgcgagtgtctaactccactggaatccgcccccgcggacgcgttcggactcgagtacgacgtcaagtaccagctgatgttgccaatgaggtcgctagcattggtcgtcagcgagttgtacgccggggagaccggagtggcttcatagtcccccggaatgaccacccgctggctcgaacacgccgagcagaagatgcggccgcacgcgcggcagtggtgcttgcgcaccagcagcgagaagaccgtgtggcacttgaagcaggcgaagaccgcgtcgtcctgcacccaggaggacagtctgcggggctgcacgaagcggtacatgtcctggccgagctgtccgtcgtcgccgttggcccagtcctcgtcctccgtgctgctgtccatgtggatggaggagctgccgcctcctcttgcctcctcctcgctctcctccaggatgtcctcgctgccctcgtagaccgagtccagcatgccgctgccgtacgcggggggtccggtgtcctccgactcgaggaaggtggacggtgtcccaggcggaggcggcgggaagcgtctcactacctgctgctgctgcgccacgcgcccattgggcgctggaggcttgcgccgccgtcgttgttgctgctgctggtggtggtggaaggtgctgcgcgcctcgaggatctgcgagaaggacaagtccacggccgcggcgtcgcgcgaggggtcctggctgtacatggcgcgccgtgtgcggggcagtaggcgacgcaatcaatgcggagcttgaagaggggagaggcagataagaggctgggatggcggacccgttacgctcagagcgacggatttagggctccaagtgcacgtgtgcaggtgaccgccgaggagaccacctctgagttggttgagttgagcgtttgggtgttgttgagcttttcttcgccaacccggggaaaacggtatttggttgaagagggtctaatttcttttggccaatcggaggtgaggaatgagaaagtgggagtttgaggggagtttgtgacttttacagatttgctcaggagcactgtcggcagacagatcgagtcaaagtggagggcgctgctgtctgaatgaggaagggacaatcaggtgccttgtagctagcctagctgttgtgtgaagccgcgcgatatgagcgcacaccaggatcactggttggaacggtcgaggatacattgggcttgaagccatgcaagtttttggcgaacctcgttacgatagacttgcttggtactgaacgcagctctcagtctatggttccgacacggcaccaaatccgtcaagacagcatgtttgttatggaccgaaagtgcagcgttacaacatcgttcactctagcacaagagtatccactattactcagtgttccataacgtaccaaagcttctccatgtccttttaacatcattcatggcgctacatgcatgtaccgctgcaattccggagtgccgacgttgttgcaacttgcaacttgcaagaaaaccttgaggcagattttgctcgatgtgtatggtcggaagaaatccagtgccactgctcggctttcgggcgaatcacgggcggccagcgtgtcagcgcggcggttggctacaaaacgggcggacgggcgattggccgaaaagcctgatttatcgggcgaccatcactcctggagaaggatctttttgaccaatgcgatgacttcaacatcggcgcgagccagcggtgattggctgaaaaggtccgtggaaacccatttccctccgaccagcttggggccgtgcgagggggaggaatccgcctatggtcactttcgaaagaagcccgaggcgagcagccaccgttagcagcagtaagagaagcaagcaagcatggacaaggtgctcgagtacaaggagaagatctcggccaagctcgagcgctacgagaagatcgtggagctggagaagcagacgggcgtggacaagttctacatcttctgcgtgggcgcgctgctggcgggcatcctgctgttcgtggtgggcggcgaggagctcgtggtgggcctcgtgggcttcatctacccggcctacatgtcgttcaaggccatcaacacgcccggcacgggcgacgacacccagtggctcacctactgggtcgtctacgccttcttcaacctcaccgagtccatcacggacctcgtgctctcgtggatccccttctacttcttctttaagattgccttcctggtctggagctaccacccgagcacccaggtacggcgatgcttgcaacttccccttcatcgcctcccagttgatgataactggcgaggtgtttgcaacggaacaccatggatctaacggtattttgttatttctatctatcagggttctactatcatctacaactcgctgatcaagccgtacgtggccccccacgtgggccagatcgacgcggcgctcaagcgcggcgaggacgctgccaagaaggtggccgacaagatccaggagaagacccagtaagccggcggcgttgccgattggtggtggtggcggtgctttgaagtgaagatcccagtcggtctagccgcaagcttcccaatggatgacgacagagccccctcccagctagtagtgacgtggcaagtgctcgccctgctccatctggcagcagcggacaggtcagcagcctgatctatcgcgtctgctccgccgccggagcggcgagcaccccgcgagcaaggtctttgtattttccgtgaccggataatccatttcgtacatggcgaagaatacaccattctactctgtgcacggcctcgcaccaccgcaacgcaatgcagacccatcctcggcatcgcatgcagcctaaatatcacacggtcccagctggacaaaagatcgggtcgtcacaaatgagtttttacgtgtcaacgtaattacgccgtcacgaccgtcaataggctgaaaagatgcttctcaatttcatcgaatcaacactaagtattacgtcaaacctgcgtcgattggccaaaaggcgggatggatccgctctgcgtttttacccaacccgctcacagttgaaatcctcgtgaccaagtgagtggaggcgatggcggtcagcaagccgttgcctgcgaaggagagcgcgctcttccgctccatcgtggtgcgtacctcctcctttatacgcttctccatgttccccttcttcttcgctctccatccataccccattcgccctccaccaccccctacaagctcgggaaagtggacaataccttgaaccatattcactaatatttaattatttatttactatccgccttagaaaaactatgagatcaagcagtacaagaagggcctgaaggcggccgacacgatcctcaagaagtacccggagcacggcgagacgctggccatgaagggcctgacgctcaactgcatgggccgcaaggaggaggcgtacgagttcgtcaagagcggcctgcgccacgacctgcgcagccacgtgtgctggcacgtcttcggcctgctctaccgctcggaccgcaactacccggaggccatcaagtgctaccgcaacgccatccgcatcgacccggagaacctgcagatcctgcgcgacctgtacttgctgcaggtgcagatgcgcgacctcaagggcttcgcggagacgcgtcgcaccatgctcacgctcaagcccaacaaccgcaacaactggatcggcttcgccatcgcgcaccacctcgtgggcaactaccagatggccatcgacattatcgagaagtacttcagcacgctggacggcgagccggtcgccaactacgaggacagcgagatccacctgtaccagaaccagctgctggaggaggcgggcgacattgagaaggcgctgaagcacctggaggacaccaagtcacagatcaccgacacgctctactggcgccagaagaagggacagtttctgctgcagctcgagcggtacgacgaggcccgcgcggtcttcgaggagctgctggagatcaacttcgacaactacgagttccagcgtggcatgcagtgcgccatcttgaagcgtacggacctgttcgtgtccaagccgactcagcagaagaagacgccgctgccgtccgaggtgctggacttcacgaaggagaagaacggcgctgagcaggagaaggccctagccgagttctacgcggagaagaaggagacgatcggcgccaagtcgctggtgtcgctgcgtttcccgctggacttcacgcgcggagcggagtttaagaagcacgccgacgtgtatatcaagagacagctgaacaagaatgtgccggtgctgggatcggacctgaagccactgtacgccagcaaggacaaggtcaaggtgattgaggagctcatccttggatacctgaagactctggaggccaagaagcctctcgatgctggcgacaattctattgcggcgaactcgacggagaaggtgctgctgtggacgaactacttggcggcgcagcactacgaccgtctgggcaaccacaccaaggctatggaatacatcgagaagtgcatcaagcaggagcctactctgctggactttttccagcgtaaggcgcgcatcttgaagcacatgggtgacctgaacaaggctgccgacgtgatggtcgagggccgtaagctggaccttgccgatcgctacatcaacagcaagaccacggagtacctgctgcacgcggaccgcgtggaggaggccgatgcgactattgctctcttcacccgccacgagggcgacccgcagcagaacctgtttgacatgcagtgcatgtggtacgagatcgagtgcggcaagagccagctgcgccagaagaagtacggccttgcgctcaagcgcttcttcgccgtggagaaacacttcaacgacttcgtggaggaccagttcgacttccacacgtactgcatccgcaagatgacgctgcgcgcgtacgttcagatgctgcgtctgtgtgatgagatctacagccgcccgttcttcgtgggagctgctcacggcgccatcgcttgttacgaggctctggccgacaaggaggagctgaaggcgcaggaggaggccaagatcgccgctgccgccgcgaacatgtccgctgccgagaagaagaaggcgaagcgcgctctggccaaggctcgcaaggctgagttcaagaggaaagaggaggaggagctcaacgccaaactgcacaaggaggtcgaggagaaggagcgcgaggccaccaagaacggcaaggccaaggcgaacccgggccccacgcgcccgaaggacgacgatccgttcggcgagaagctggcggagaagcccgctctcgaagaggcgtggcgcttcgtggccatcctgcagcgctactctccggaggacgtcaagacgcacgtggctgcgttcgacatcgctctgcgcaagaagaagttcctgctgtgcttgcaggctctgctgaaggctcagaagctggagaacgtgtcggcggaggccaagaaggagctgagctcgcgccgcgcagttttcctggagcaggtgaagcaagtcacaaaccccgtcgtgctcaaggtcatcaacgagaagaaggccgagctgacgaattagagagtggagggggcgaaagaaacggtagtgcagtgtgggcgggcggtcgtgcagcagctcgagtcgattgggcgcgagtattagagacgaggtagagacaggagatgcagcgtccgtcgacagtcaatagagcggcatcctgcgtgctgccagcgcctgccacaatgataagccatgtcatgtgtcgttcccagtccccatcgttgccactcattccgccccgtctattggcgcgcaaacggagacttgtcaactagaaccaccacctcgaaagatgtggcgctgtccttcggctcgcgtgcttcggagccagctgtccctgtccgtgtgtgggttctcgagtgccgctactgggggtgatggccccctgaagctttatgtgatcgctggggaggcgtcaggcgacgcgatcggcgccaaagccattcgcgctctgctgcgccaccaaccaccacagtcgctggagttccgcggaatcggagggtgcgtcactattgcaggggttttgagtggatgctggcagatgctgacgaagggatctttggttcttgcaggcctcagatgtgtaaggctggaggttttgagtcgctcttcccgatgcaggagctgtcgctcatggggcttgtggaagtggtgccatatctttggcgctttcgggtatggttgggcaattgagcaatgactactgaggggatacaaggacgctgttgctgaacatttttgtgtgttaatggaacagcggcggattcaagatactttgcgagatattgaagcttaccagccggagttggtgcttacgatcgactcaaaggggtttacgtttcgagtgctgaaggcgttgcaagcgagtgagcagcagagtggtggcaaacgcattaagaaggcacactacgtggcaccgtcggtctgggcgtacaagcaccgaggcaaacgtgacttcacggagcttcagcagcttttggatgccatgttcaccatcttgcccttcgaagaggacatcttccgtgcgggtgagagcagtcagagattggagagtggtgaagaaggcgcgacgcaatcgtggtgtcattttgtgggccatcctgctgtcgaagacttcctggaagctcatggagccttcgatcgaattcctgactacgaaggcgcctccgcggagacagacgcccggcaacttgaaattggagcagacgctcttctagacttgtcaaagttggacatgagcaatttgctcgagcgtggtcagtttttccacgctttggcggcgaggggacgtgaaccgaactccagagcccaagccagaaaagagtttggcgtccccgatgatgcgtttgtgatctgcgcccttgttgggaggtaaacctgcttttatcttcgtgtccgagcgcaacgatcctaacggtttttcccccctgtgtagccgagcaaatgaagtgaaaaagtcggcgcggttggtacttaatgccatcgctgaatttaagcaaacaaatgcctcgatgcgggagaagaatgtaagttctgctcagtctgcttgttctgttttgcaagaatgctaacctgtcctgtgtcatagatccgtgtcgtgttcccaactattgctgcagtggaggatcaagtgaatgcctacatctccgtggcatttcctgaagtaaagtgccaggtgcttactgatctcgatgcagcagcacgatttcgattgtttcaggtgactgagattctttggtctggtgaattgatgttgcattggtaacacgcttctgcctcgttcatttgtaggggtctgatctagcgttggccgtgtcggggacgattgtgcttgaaactacgttagcgaacttgccgaccgtggtgatttactgcgccaacaaagtgacggagtggatcgcccagcgattggctgctgtgcgattcgtatccgtccccaatctgctgctcggaaggtacgttagtgccatcttacttagcattcattctccagaatctaaagtcacttaccgcctgtatgtgtagatctctgctgcccgagttgctttttagtgagtgtactgcttcgaatattgccagcgcactcgggtaagccttatcattgactcgtgttttgctgccacagcaaaattgtacactaaaacgtaactttgtttgggtcgtagtgcgctccatacacagtcgcacgatccaatcgacgcgctacatctggcgatggctgttggcacgttaaccaaatggcgagaaaaaaacgacaagcttgctcctggagctaaacccgcaggtctgaagccgattcgagctagtgacctggtctccaagcacatcctcaacgttctgaagatttgaattgaataaaaacaacgttcttcctagccattcgagctttatttgaattcctctaacacctacagatcaccgccccgagcacgaagccaacggtgaacgagtctagccgccgttgcggtcttggcgtagtttttgaaactgccagtacaacaatgaaatcgggtaaatgcaactctcgattgcatgtgtgcagcgtgtgaaggcattaatgactattttgtgtaaaagtatcttgtttatcagattgtgccatggacccactcgaaacgaagactgaaatccgcgcctgcggaagcaaacatgtagacaacaacgatcagaaccattttccggggggtctcatgcgactacgtaccaaagtgcttcagctcgtattgcaaaacacttaggatcagaccaaacaggattgcttgcacaggatgaaactccgtttcaagcacgaacgccagctgctgtattggtgaaaatacgaacttgcgtcgtacaaatgctgcgaaagacaaaacaaaccgacctccagcagtgaaaacagcgatacgtttgtcactcatgtcctatcccagttgccgccaccaccaggataatacacaacattcggtagatgctcgagaatcgacttgtacaccaagaaatgatcggaacgatgcactcaacgtactggacaagcaccacgtatttggaatgggataggagccgcacaccttgagaaacaatttctttcgatcgatctgcgttggccaggaaggaattactccgacctgattgaagcttggttgatgctattttgctcggtgcaattacagcctttcgatgtcgcgaaagacgccgtagcgaggtcacctgaagatgttcgtctttgtggctatacacacccagtttttcaagagcctgcagcctttcgagcgctcctgcagtgagcgggtacggtaaacacgcccagtctcacgttctcgagcgagttcggagggaagaaagcagaatcttgtgtcgactcaagaacaatcgtcaacagattggtcgagtcagaaaagggatactttttgcggagatgaggttgggaatttcgatgctggcccacgagcagcagcagcgctcgactattagcactttagaccgaagctccagcaacgattgagccgtgcttactgcgacgaataggatcatcaacgaaagggactttgacgtcgacatacacaccgaaatcaagagcgaggataatttaaatccacacacagcgccacctgcatcagcatgatgtcctccagttcacgtgtggctttcaccaagaaatgtttcgccgcgaacttccaaattggtagaatgaaaactgcgatttctcgattcgcctccggaatatgctcgtacaggactttgtagaccgggttcagggtgttaagcgtcataaatgccaagaaaaagcggttgtatctgtcgaagtcagtcttcaacggggagttctgtgcaaaaagagctgagcccaggaccaaccgaatcatgattgcgttgtaaattccggcgtgagttgcagcatgaacggcactgggaagccaatcttgactgaagctagcagacaagcccccaaaaatgcgatgctaagtccgactgcgatagccactctcttcaccatcgtgaactggaggtctgggatcagacagatcatttgagagtttactacaaagcccaaaacgagatgaatcacgaaaagacgaagccagaaatcccagttggccctccacccttccgacggcgattgcagcggcaaacactcgagtagcacagcaattgttgatgctggaatcggagaaaagacgcagatggcgacagccctccggaacgatgtcgttttgcgatagtagtcgagactctcgaggcgctcaatgaagtaggtgctttggctttcgatctggatgtcgttccacacttccacaaggcgtctcgaaacgcgtggtggtggtgagcgtcgtttacgcgatatcgtcgttgccgaagagcttgcaggttgagctaacacctcaatctcggacattgtgcaatacggcgagttttgagtaatggtgagcaagcgctcagaagtcaaggaaacggattggcagactgagtccagttttataaaaagtgttgttcatatcaccgtaggtaataagattacttgcacaacactctgtttaataagtaagcagtactacttcgcatgacacctgtaaccgcgtgtatatttgttatcaagcaagtccaggacctcaatggacatcattgatgtccattgagatcctggaattgatgtcacgtcatgcatgtttgccaaatacgcgctccgcgccgtcctcctccttcccttttaaatacgctcgcttgaatcaattctaaaagtgacgtccaagctgtatggcgatatgcaaccgacaagtccaatgaaaatattctcgtaggtgtatgtccacaaactggtttgatgctattccggagctatgaaaagaaccgcgtactcgtaggtatgcttttcttcatagacgacaagttgagctttatttgaactcgaaagcttaagtaggatgccctaagtattttgcgtaagaaatcaccgtgaaggactcgatgctcactccttcgggcgttgcctccgactccatttggaagaaccccgtcgtttccagtggtggcgagacgaaaacggggatgctgcagcttccgtcgagataaaagacacaaactgcagtcgatggcaggtgctcccacacgactcgactggcagggccccagcccttgctcttgtagaaggaggtgcacacggaagtaggagcctcgaacatgagcggaatctgcggaagcgtcacaattcctgccttcgcgattgccatgcgtacactttggttcttcagggcttgaaacaattctagaagtgatgaccaagctgtgagaatcggtaagctcaatgaaaaccctcccgtacggtagtgaatctaaccacgttaaaagggtgaggggtttgacacacggtgatgacatcacctacaataactcggacgatatactcgatatcttgttcaaaaaaaacacacacacacaaacaaacagaaataagtaggggaattattccttgcaggaatgagcacaagagaaaaccgaaaacaagggatgattttcatgtggggggggttagtataaaaaacgacacaaatcttcccagcccaaggaatgaccctccggaggcttattccttgaaggaatgagctcatgaagaaattattaactgaaaccccctattattggcatggattggttttcatgttagatgttttatgttctcgagggccttgtcatgttgaccccatcctagttgtgcggcaacggttcatgccagtttgccgagatgtctcccgactgcgatccagtgcccgagaagttggcagacgtcgacccgttaatcacatcgctgcgctcgtgatagtcattgaggttaaagtagcattcgctgacgacgccacgcaacggatccatcgaggtccccactgccatgagcgacctgatggcgacccccgcggagctgctcgtgagcaccgacgtgccggaggcttgtccgatgggcgacgcgaacacgattttgcccttgcagtcgtcgtccgagtagaaccagatgctcaccgccccgggaacaacgcgccaattcactcgttccgagttggcccaagcgctgcagtgcgagaacgtcgtacacactcgtgttgcagcgtcgtaccacaggtccacgccattgacggttcgaactccagcgactgccatttcttaaatagcaagatggaaagtgaaggacgccaaagcaaagccgagaagctccacacgcatgaattttactggtaatcggtgtttgtgggtggtgttcttgtttcacttctaaatatttcatccttgttgagggaaaatgaaagggtgccataagcgcggagactgcaggatggtaaattcgctcacctagaatgagcgactcgagcggaagtggaacaccatccagatttaacttcacctccaaaaccgagaaagcaggggttcactcaggcgtgatgtcggatggatgaaatttgtagaatagcggtaatgttgccaatgcatcgtaactggatgggattaaggttccatgtcagtgagccagaccaaaactaaattatcttcggcctttcgggcagacacagttcgaaaccgtggattgcaccatgtctgtgaaaaacactgtgtaaattttctcggccttttggtcatttcccgttttgtgcccaagaagaccaaccaaccgatctgtgatggcgctaacgaagctgactgtcgattttgttccgaaggactccgtggcctacagtacgagcgagagcacgtacctgtgcatgacgctgactgcttgctctacttggaaaccagcgaattcggtctcttggcagaacctgccagtgagcaagttcgtgatgttttatacgacagacacctgccgcaccgcaggcaagttctactacatctcggaagttggacaggtgaacggcacccacagctttcggagcccgcaagcgattcggtcgtttatgatcggggaaaacgactacggacgtcgaccatcgttcatccgcaatgcctgcaactatgccatggagcgcgtttttaccacggacgatgagaacaactcaatgtccagtaatgagatcacgtggatcactggaggtttgtccacaaactggtccgatcctgttccgacatagcaaaagagatggaaccttcgtaagttttgttagacgataaaactggtaaaactacgcaatcttatgttgctattctctctggttgctagtgcaaaatgcaatcaaggtattatttctaaattttcttcaggacccacgaagcttcaagcccaaataattatttagtgagattcacttgaattagtatgtgtactttgtagtcgcgttcagcagctcggctgatattcattgcgcgccatatgcgaagaactccagcgcgcacgagtcgctcttgaaaactcatcactttcactttggttttctctttcaagctccaacctgacgctggcgaaatatcgaggccaatcatgcggatgacgttagtgaatcccaagccgtgggcatgcgtggaatagcacaagacgagctctgtctaccattacacttcggaccgatagggctgtgcgaatggttcgctcgaggtcacgaaggcacgatcgatcagctacgatgatggtcgagaaggtatcgcttacatatgatcggtcatcgttctcctacaccagcgcctgtcccaagacccccccccctccggcggcaaagaggagacggaagttgctgcaaatgagcatggtggtgctggtattgcctggggtgttgatgatgagtcagccgatatcgcaggactatcatcaaactggaacgacgttattcccgacgaataggatacttcggtagtattttccacgaactcaacacgacggatgaaaaacagaccacccggagtattatgttttccattgttttttaaagggtttctattgatgtttccaaagtagagttgagatttaagaaatgattatacaacaaaacagcaaacttcggattgatccctttatggaaaaaaaaacttcgattcagatagtttcgcttgtgtttctacactcaacgatatttcggcaatagtgaagattgagttgagcaccgcataagcatggcatttcgaatctactgcataatcaccctcgtttctgtatcaactgcgtaattatcctgctgcacaatcatcgagtggtacggttcaatcacacatgtacgatacgcggctgggaacttcgtttaatctaaaacaatatacgctcctaagcgctctcaagtaatccgtgcatacccgttaaccttgtaaacatctgaggccagctgtgttttatgtagtgtcgtgggtagcccagcgctctgagtacggctctaagcaactgctcattttgaaatatcttcttcagactccacccaactcgataatgcagatttttgctcccctcttcgctcttgccggccttatcgccaccgtcaaaggtgcatgcagcggacccaacactcgtatccatcctccagcggatgccatcgtcgtcgacgccacgggtgcatatagcggtagcgaccgcaccgtagcggtagtgtggccaagcttccgaacacgacggcggaacaccctctcttcgtatttctggtgtgtacgaagagcaagtgatcatcccgaaactcaacggctcactggtcgtgcaaggctacacgagtgacaccacgtcgtacgcagccaatgaggtgactatcacccacgccttggcccagtaggacatccctccaacgatctaccagcatcgcaacgaactcaccaccacgctgcgcctcgggacggacaacgtcaaggtctacaacctcaatgttgcgaacatggcaggcaagatcgagagaggcgggcaggcgctcgccgtctcagttgtcaccaccaactccggagtttacgcatgtgctatcatgtatttttattttctttgttttgttcattattgtcagatgggtaataatgctaaaacttttattttatcaggatacgctgtatgcgaacaagggcgccaatctgtatgccaagtcgtacatcagcggtgccatagacttcatcttcggccaggtcgcgaatgcgtggttcgaatcgtgcgacatcgtggctctcgatgagggtcatttcaccgcaaatggccgaaactccgataccaacccgtcgacgttcgtcttcaataacgcgcgcgtgtccggcttggctgctcctggaacggtttacctcggtcgcccatggcagccttacgctcgggtcatctttcagaacagtgagctcagcgaggttattaatcctgctggctgggagttgtgggaggacaacaacaccgcaaacgtttacttcagggagtgcaacaatagcggggttggtgccgctactgaaaaacgagtggatttcagcggaatgttggcgaagcctgtgacgatcgcggaggtccttggcgagaagttcaagagtgagtggtgggttgacaccagtgaggcagcagatcctatatattgtctgcgtcgtgactgggacctcctacatgtttttaaaactgcaaacttccaagttgaccacccgcaagcgtgaggtcaagatgaacttgtaggaggaaatattgtgctacgtactttgcacaaaaaatacgactgtctttccaggaattaccgttcaacgcaaaatttgcgctatcttactgtatgaatctttacgaatattttgcaacatagatccaacatctagggggaggggttgttgcgatcagagcttcagaaactggggtaagtcgatgacgacggctgtcaatagcaggattgctcccaaatggccggtgctgcttgaaaattgagtggcaaaccctcaattagaagacactatgattatgaacaaccctgttcgatagcgtgtacgccttggtttgcaatctgattgccgatttatttctttcgttgaggtctataattcacggtcgtgtgagtcgtgaacgagactttgtttttgttgttgtagagctaccccgcctccgacatcattcgctaaattttgagaaatggtacatcccatggagcaagagaccacagaaaccaattggttgggcgctttatccggtagtccaaggcgttggctagtttacttttaaagctaaaacatagtgggggagataacctcatcatacgtggtgactgtgtccattcgggcattataatcaccgaatgcacatgtaaagggatgaaagaagaagaaaaccaatattcgcagcttttatcgtctgttactacgtgctcatacgaaactatcagctgaaacaaggagcagttcgacccgtccatagtcttcttcgtcctacgacacgtttaccgtcaccgtggtatcagggagagcatcggaccagttcgccgacaaacctccagatccctcggtgctccacgtgacctcgtacatatcgccggagtttgaatcattgcccattgtcgttgcgcgttccttggcagtgacgcaggcagggaaggcaattgacggtggacgcgcgtagccgttgttctccccaagcatgaacgaccgaatggcctgagagctcttgaagttgtgggtgccgttgactgtccccacgtccgagatgtagaagaacttgcctccggtgcggcacgtctcggtctcatagtacgttgcgaacatgttcgctggcaggttctgccaagagatcgacgtcgcgggctgccaggtagcgcagttaggcagagtcaagcacaggtacgtgacgccaagcgtcctagacaacggagacccctcccctcaaagtccaccgtcagtttgatcgacaacatcacaggccgaccagctactcagcccgcgaaatgggaaatgaacaacagcccgacagttattataattatattagtcacagacgcacggatgatgcaaggcgtgaatcaattgtttcgaaataaaagttagtgcttcgaagtattccaaatgatgagatgtccttcctatcttccgcgcagacatcgaactagaacgttgtgaacactacgactgcgcgttgtcgggaagagcgtcgttccaattcgatgataggcctcccgattcatcgtccatcccccacacaatacgcgtgtccgtgtcgttcgccgtgatgcctcccgcctctttgcgcattttggggcaagcgctcatgtagtcgatggaatgcccacggtacgcgggcgtcagttctgagagcatcagggagcgtatggacggcttgtctttcttgaacttgtactcgccagcgtagcgcttgcagctcgagatgaagtagtagccatcggtcttgcagttctcgtcctcgaagaagtagcaggacaggtcgctcgagatgttcatccacgacacagcgctcgtcctgtgccagtacgagcaggtgccgaacccggcgcacgtgaacggcttcggattcatcatcgtcagcgactgctggtccacgaaagtcacgcgcatgtacggcctctgcatattgtgagcgttgaggtggaagtctgaaagagagcaaaaaggaaagtggtgtgctgttgagaagaacgtgtgaggcttggctagtgagaggtcctactagctgtgattagatcctccagcattcactgatttcaatatctcatagtacaggtaaacccaacgatggcaccatgcgcaggtttcattatagtttgaagtatacaacgtacaactggaagaattgggctggtagtacatgtaaactgcactaactctgctagaactttcatcgtgcttgagagaatcaaatagttctgcaagcaagaataatgcaggtcacctagaatgagcggctcgagcgaaagtgccacgccatccagatttaaattcaactcgaaaactgagatcgcagcggttcagtcaggagtgacgtcgaatagccactcgcggcaatgttgccaatgcatactaaacgggtagaactaataaggattccgtgccagtgagccagaccaaaactcaaattttgaacagtggattgcaagacggatctctcggttatgaatggcacgcctgtgaaagaaactgcgataagttatagacatcttggacatttcccatttcttgcgcaagaagaccgcccgcccatccgacctgtgatggcgctaacgaagctgactgtcgattttgttccgaaggactccgtggcctacagtacgagcgagagcacgtacctgtgcatgacgctgactgcttgctctacttggaaaccagcgaattcggtctcttggcagaacctgccagtgagcaagttcgtgatgttttatacgacagacacctgccgcaccgcaggcaagttctactacatctcggaagttggacaggtgaacggcacccacagctttcggagcccgcaagcgattcggtcgtttatgatcggggaaaacgactacggacgtcgaccatcgttcatccgcaatgcctgcaactatgccatggagcgcgtttttaccacggacgatgagaacaactcaatgtccagtaatgagatcacgtggatcactggaggtttgtccacaaactggtccgatcctgttccgacatagcaaaagagatggaaccttcgtaagttttgttagacgataaaactggtaaaactacgcaatcttatgttgctattctctctggttgctagtgcaaaatgcaatcaaggtattatttctaaattttcttcaggacccacaaagcttcaaagcccaaataattatttagtgagattcacttgaattagtatgtgtactttgtagtcgcgttcagcagctcggctgatattcattgcgcgccatatgcgaagaactccagcgcgcacgagtcgctcttgaaaactcatcactttcactttggttttctctttcaagctccaacctgacgctggcgaaatgtcgaggccaatcgtgcgaatgacgttagtgaatcctcgagaaggtatcgctcacatatgatcgatcatcgttctcctacaccagcgcctgtcccaagccccccccccccccccggcggcaaagaggagacggaagttgctgcaaatgagcgtggtggtgctggtattgtctggggtggtcagccgatatcggaagggaacgaagttattcccgacgaataggatacttcggtgtgcggtacttatatgaagcgctatggattttaattcttgaaagaaacgctccggtgatgtacttcttggaagtatatacgctttttatctaaatgattgggtctccacttaagcagtaagataaaaagccaaaatcaaaatcattgcggataaactcataaaaatgtgttgcaataccatgacgatcctgcggaaccaaacaactacccaaaatatatttcagaaaatacccgcagggttttcaatacgagcgcgtagcgaattaacgcccattagagaggcttttagaagaaccgtttttcgtgaaaaaccgtatccaaaaaagtggggcacccagtgttgccacctacgtgtttccagcacccgtcaaacgggaaaagtgagctctcataccgttcatcttatttgaaaatcacgtaatgcaaaactcgagaagacaacgtacacgagaggcaagtgcacgcacagtaggtcttggggatcgtgaaaacacgcatgtcctaaatgcatcgcatgtgcttcacaagtcatgcatgcagattgatacggggtttcacgacttcttttttttaataatatccctaaagcagttccctttattcaaatgcacgtaacaaagacgttcccacttgtggtatttgtgcgctccttggaactgataggacaaccacccaagaaagttgacggtcgacgtgcgtagtcgttgttctccctgtcggctctccggccactacgctgctcaaacgcagagtccaactagagggagcaggcactttggcgagagtaggagctagggcagaggcgtagatagagaccggcttagggaaggagcgttcttagacagccgacaacctcggacaggtctgtgggcctgctcctacgcctatcaatccgaacatgtaaacatgcaagaacgaggacccttcctgtttacgcttgacgcgctccaggtccaccgtccactcggtcggggcgtcaccgatagacacctaaccacgccccagccactctagacgctacatcaacccatcttgactcactccgtaactactcgggccgtacctcgcaattgctcgcacgctccgccgacgtcccacgcagtatagggccaccgccgcagaacagaacgctgagagacctcttgtgttgttgggaagggccggcactcctgccgcagagcccctcgcgtagtagattagctgtttaacttagactcttctcgtccaaatcgcaactgggaggtggagcggtcggccgcacgttccagagctcccctggctaagcctatactaaaacctagactactgcgcgatcttcaaggggaccctcacccgtcgcggccttccatcagctcgttttggatccaatgtcgcctctccttgcccccatagtcttcttctgcttctctccgccgtgtcctctctccacggcgatcttccacggccgccgtcgacacttccagcaacttcaatagcgtcggtgactgcagcatctcccgtcaccagccgcaccgcccttgtcaccgaacaccatgctgtgcgccacaccgtgtacaccacggtcacactgcttgcaggtatcgtcgaactcgtgcttctcccgacccaagaagagcgggttgcctacatccccaagcatgaacgaccgaatctcctgggagctctggaagttgtgggcgagagcaggtttcggtcgcgtaataggttgtgaactggttcgctggcaggttctgccaaagagatcgacgtcgctggctgccaggtaagatgagcaggctggtagcgtcacgcaatagtaagtgaggccactcgtgctaaacgtcgcagacttctatccaaactcgaccgccaattttatcggcgccatcacaggacgaccagctatatatataatactcagcccgcaaaatgggaactcccacagggcgcatctttcaagacgagcgatggcggaaagggatcaggaattattatttttatcttctgcactggcgtgaaactcgaacgtggtgatcactacgactggtggcttacatgtaccttcccattcgtatattgcagcgaatgactgacagtcaggtagaagaaatctccgtgttgtcgagatcatcttccacacccattcgccgagatgttgtccgcctctttgccgctcgaactcttggggcaggcgctcacgtaggtgatggtaggctggcggaacacggtcgacatttttccgaccatcatggagcgcatgaaccgctccttcttcttgttgatcctgataagtccggcagcgtagcccttgcgatccgagatgtagtggaagtacacctgggagacgcagctcgagctctcataaaagttggcgtactggttgctcgagaggttccaccacgatatgttggccgtcttgtgccagtacgagcagttgccgaactccacgcaagtccacggctttggattcatgatggtcagcgactgcttgtccacgaaagtcacgcgcaggtagggcctcggcatcttgcgagtgttgggagtgagtgagtgcttcaaagagagacaaaggaaaagtggcgtgatggtaggagagaactagtgaggcttggttaaaatgagggctactcacagctgtgattaagatcctccaccgcccactctatgttatgacaggtaaacccgagtacaacacaatgcacaagaacatgtatcgaccatagatttaacgtcccattcattttcatgttaacatggctggatgtaatgtcatggcgacttattcgtccgatagatcgtcgtaccagtttgacgacagtccgctgtcgccccactccacttcgtatgtagtgttggcatcaattgtgcgttcatagtgtgcaggacacttttgcgttgtcgacacagggcggtgcgtgcacttttggttctcgccgatcatcatcgactggatggactgcgggttttgaaacctcttgatgctggaagtgaggcctggcgtcgaaacgaagacgaacttgccatccggctgacaccgcttcgactcgaagaacatggcgaagtggttggaggagaggttgacccacgagatggagcgcgcaggttgccagaagtcacagttcttggaatccaggcagcgccaaatgccggggtcgttgtacttgaggttgtccgcctggggaaataccacgcgtaggaaagaatccaccattgaatcaatatgaccacggtgataagcgcgttcaagagtgcaaaatggagaatgaaaggctggaaccaaagctacacttcgcttgaatccgttccttaccatcgtaaatcaagtctctaataacagaacccgagaccgcgcatgtcgtagtcgtatcttgagtcttctttgcatttcacggcgtcagatttatttactaatgggctaattactgtcgattcaacttggagaccaatctacactactaccgactcgcaacattctctgtcacggcgcggaaaccgatgcgcccgcaccgtcgtaggcgtttgaacccgcaacgtcgtcgctaggaagcgcatcattccagttagacgacggtccgctacctgctaccgatgtgatggtggcccccacgacgtacgcactgacatcgctgtcggtcgatccgagccccgcgcgttctgcatcggggcacttggaatagatgaagtgcggtcgacgagtggggtcgctggattcagcgatcatcaccgaccggataggccttgacttcgggaatgtgtaggtcccgttaagcgcgaacagggccttcttggtgtcgtcgacttcgtagcacgtagtcgactcatagaagcccacgaacatcgtctccgggatgttggaccacgccgctgtcttcgtcttctcccagtagtcgcacccgtcaaaggtccagcagttccacgccgacttgagcgtgaactgcaggctcgaggtgctgaggaaggtgacgttcaaagccacatgcacggaggacattggcgcttgtcgccacgaacgcaaaatttggagtgcggacgagctgctgggtcgcgccgcatggaggtggctgtatgcacttgcttttccaaccactgccaaccgcatctcaagcgaggtcgacggaacgtatcggaggttgtctgcgctttgttcgaacagcgaagtgcagttgaatcgttttcgcgatcggaaaacagaatggaaccgtattgttcaaagtgccacttctatccaatggtcgagtggatgagctcctagtgcttgctggacgagcgagctacactgtacatgcatcttattataggcgttgcttgcgtagagctcatcaatggtaagctgggggcgagttggtggcaaccacaggggctgcatgtaggccggtaagttctataagtaataccttagttagtaataaaatgaggatattaacgtttgaaaggtcattaactatgacacaactactgaaaatttcaacaaacactcgatttcctctcccactttccgtatgtgttctgccgcgctcaggggccgggacaacacaaaccatacacgacactatggaaggagaaaagaaaggctgactacgtgaggcctccttcggcctgagctgaaaaaagcgaaagcgtcttcatccctcttggtatcattaccacatccttcttcttgtaatcatttgagctctcttcaacaatctagtgctaggcgaatcaatgaattcagagcccgctgttactgtacaatactaatgccaagtgccgattatttactgctttgtaagccatgtaatactagtatctagcctcgtgcacgctgttacattataaacagggtggccacaccgacgatcctgttctcttgcggtcatttagtacttgccaagcaccttttgcgttttaaaagcagtaaacataacagtggcctcaaacaagtgtttttgtgtatttcctagttcttgaaaaaaatgaaagtcacaaatgcaagcgctcaccgcgtcggatgcagaagacgacgtgatcgtcactgcaggcagcttggtgaatagttggttccagcggccgtggcgatcgaaactccagcagcagcatggtccgccgaagcaggaagttcgtcactccagttcgacgataacccaccagtagcgttgacttcgttcagccactcgatcccgtcggtagtgttggcacccatcgcggtcgtctcgtgaatatgagaaagaaccggtgtccacgacacgagagttttggacacgtcgcagtcgacgtacatagtggtggccagggatcccgaaaaataaatacgcccggaaatatatttgtattttcggaatcaatattttattgtaggtatacctcctcggtttatccggtatttattccagcttagatcaaaacttctagattttatttctgcggttgaatatatccttcatgattgagaagtttttccccctaattttcattgtgttaacgccatcaaattttccctttatgctaaaatgatgttgttcagcaaccttaacacggatgtggcgaccgtgggcagtgaatcactgctcactgccagtgattgtaagagcccatgaggtaacacgattgcagcaatttactgaataatttactgcgtcagcacggggtcttcagattatttatttcttctctccttggtatacaaacaaatacgtatttcgttaacttgagaaaatagatatatatcgtattttcggcatgcctggtagtggctgtgagtgcctcccggagcacagcatcttcattgcgccccaacatcatggaccggatcatctggccaggcttcagtggatgcgcgcccgtgacatgcgttcgggacgagtcggtatggaaggtcaagtagccgtggcggtagctgcagtcgggactctcgtaaaacgcggcgactttgttcaacgggagatcggcccacatcacgagcaaggcttcgggcaagtgggggcagtcgaacgagcggcacacgtagtcggatgcgttcacgtatgtggccgcccttcaagagcacttcaatctttggcagatcgacgacagtggcattcttcttgacgcccgcaataaaacgattcaagccgctgggttgtacgacaaatgggaagtgatggagagacacgggtagagtgaatgaacagtatctacgtattacacactacccgagtttgtgagtatggatactacctagaatgctgcaagatattttttttcaaatccctgcatttggggtggtaaaaatatggttcagaagaacttctatgatatctacttctagtagataggattgatgcactggattctacaaattatgaaagccgacaaatgcattcttcgatctctttgtggaaccactacaatgtcgatatcgccagctaaacgttctacctgaatggttcaaaattctcgaatgtgcatacgagtcccttctcctgagtttttgaaccaaaagatagatgtaactacttaagtacgtgtactacaccttgacaaaaatctaatacattttcgtttcttcgtaatggaagcggtcggaaaccacttcagtggcaacagcaaaatagctgcactacttttgcttcggagcgcaaactgacgtgtgtgaccccctctgcctgaacgggtgatgtgcgttaatcttcccttggtccgaggtgtacatgtaaaatccttcgccgctgtagaagaacatggcaaacgatagagaagcatgactggctttccggattcgggtattccgtgatggatggtttccgttgagtaaatcttgtacatggctgagttttgcaagacatcggcgttcacgctggcaaatttgacagtgaattcgctcggagtcggggagggcattgggtggtagcgctccgtaccttaaacgttgttaatgcagctctaaaatcgcccacaattaggtaattaaggcctgcgccatcgaatgaggcttaggtggactgtaatttgtaggttcgttgcggattcgtggataaatggctgaaccgtagcaatccattgtggaaggtgacttcgatcagtgagttcgatgtagcctgcaaatatatagccgcactaacttgcgctcctttggaagcagcttcgcattgttagcggttttctttaaattcaaccgcggtaacaatgttgttcttcttttgcttaaccccaaaacgcaaaaaacaattattgcctcgaggcagtaacatacatgagggctaacacagagctggacgaaatatattccgtttattcctactttttatgctaaaatgatgcccactaaatgcaaagttttcttcagcttcgacgtgcgttgggccactgcctacaactttggggttagtcggttccagcgactcgcggccgcaactttaccttcattagcgtcaccagagaagcctcccaccgatgaatctggaagttcatcgctccagttggacgacaacccacctcgttggcccactccatctcggaagaagtgttgccgcccgtcgcgttcccatcgagagtggcgctgtcaaaacctcagctgagtgcacggacaagtcacacgtgtgagacaccaaagtggctgtgagtttgagattctccttgagcacggcgtcttcgttgcgtcccagcatcacagaccgaatcatcctggtctgcggttggagtcacgggcaacaaactcgttcctgaaggaaaccagcatagcttgtagacactagtgatggtatacgaacgtgttgtgggtaaactatattgtaaagcaactacattgaaacttagccaaacctcatgacacgcaacagattgcattgatgaacctgtcttccacttccacacgtggtggtgccatccaagtacccttctcatcccagtaccaagttcatgatcgcccaatacttcgactccttaatcggctcggaccagttcgatgaggtgccctcatccacagactcaacgacagtcggctcggttgcattgacgtcgtcacccgcaccactcgatgtctcactgccgaccagcgacgtggcctcggctcgcttggcaggatggcgaggctggacgcactgacgagcgacactccaagggatactgcaccacaacggccgcgcgtagatggatcgaatagcttgcggcgtcttgaaggagtgcgcaccgtcccctgcctcgttttcagtccaggagtagacgtcaccgttggtcacgccgctgcagccgtctttctggtagaagtcgacgctccaatgagccgggaggtttctccatgcgacggacttggcgttgttccagccggcgcaacctgcaaacccgatgcacacacttttggaggggttctggtacaagaagtagtcgccgctctcaagcaccacgcgcagctcgaagctgtcggccttttccatgtcgtcgaagtggggagatagatgctcttggttgcaaagcaaaacgaaatctacttaaaatctggtaacatcgatgggcttgttcgtgcttgtgccagttcttgatatattggatggtaatatcggcgttgtcttactacgatctatacaacggcaatccctaggaattctagaactctgatactttcaaacaaaaacgcttctccaaatcttaccaccgcgtaagtaaggaaaaaactattaggccagcaggtaataaaaaagcattgttgttgacattttttcttaccaacaaacgaataaagcatggattttcggtagaacttgtgctcaatatgagcggtagcagtgccaaccgctaaaagcctacgcactgctatgtttctcctattcaacaggaagaagattcgtccagttcgacgacagacctccttcggcactgctcaactcgatcgtggacgtagcgttggcgacagtgtcgttgacctcgaggccttcgaatgtggctcgagccttggcaacattgcaggtctgagccgcctccgtcaggttctgcaccagcaacgcgtcctcgtagtccccgaacttaaacgaccgaatggactttggcgtctcaaactctttccagccgtcgacgcggtctcgagtcgtcttgaagttgtatttgccatcgcgaaacgtgcagtctttggtctcgaagaagatgccgacttggtgcgttgggagattctaccacgacacccacgtcgatggcgcccagtgggggcacgtgtcaagccgcatgcagtactgctcagacgggttgtcgtaacgcagacgcatgccgttctggtagttgagctgaaagaccggccagtttggcatgctatatcgcccctttcgcgggcaaagcaaaaacaaaaatgagggaagatggccctccccgcaacattatctctgccttcggccttgttactcgaagcttgttggatggcaacaacttggagcgtccagaccatcaagtagatttaactgccgacccaaccaaaaaaaaatgatacatttgtcttacgtatgtagaaatcctgcacggtggtgcctcagtcttcgatcggttcgcacaaattcattgagacctcttccccgaggctgcatacggagctgttgatcagcgtagactctgcacgtttgacaggatggcgaagctgaacgcactcgcgagccacacccccatgagacttttctgaaatttggtcggtcgcggatcgactgtgtatatgtagcgaaggtgtgcacgctatcagttgagaagcgaagtacttcgaagtagtactcatcctcgtcactatgaatgcacgcatcggttccagttcgcagggaggtttcgcaacacgatggacttggcgggttgccaatgcgggcagtcggaaagaaaaggactttggtaggtgaagagaactctgttctcgaaaacaattcagaccacaaatgtatccgatttctccattctgcaatgtaacgttagaacacgttagttgatatcgacgaatggcacctggaatactaggagaatgattcatcgctgggctattgcctgccgttaggccttgacgtctgtgtcgaaatccagcaacaacctcagatcagcaatagcgggcaaattcataacacatactcagctaaaatccaccaccatgggcgcttttaaaaccacggtctggggttctctactatcaaaatagcctgtggtaagtttctacgagtagtttattgagttcactaccgctaagtgttcatatcatccttcactactagcccgcaatgaccggctcaaaccaattcaaggagatgtcttcgcggaagtcagatagaacgacgccagagctgttggccccacttccatcggtaagcgtcagctcagctcgcttgacaggctgccgaagctggacgcacttgcgagccacactccacgatattttcccgttggacggccgggcgtagatcgacttgattccgcggggtgagctgaaggtgtgcacgccatcaattgctctattacgagcaaccgagaacacgtcgccatcgttgccgacgcagttgtcgctctggaagaagttgatgtaccagtgcgcggggaggttgcgccacccgacggacttggcagcctgccagttcggacagtcggaaagctggatgcacgtggactttgaaggactttggtaggcgaagtacgctccgttctccaaaacaactcgagcctcgaaagcgtccgccttctccattctgtagtcgtccagccaaaaggcgattgacggagaactcgggagttccatcccgaagaagtctgcaccatcgacgatatctatgaatcaatcaaaccagttcggctgttgtcgttcgtcagccctcattctcatctgacgatagcgctgttgctcacaactccacaccacaccagctatagctatagctaacaccttgataaattacattcacttagcgagcgccgcggcctatatacaatcatcctccgagcggggcgtcgtcgaggtatctgacgacgtccaccttgcctgggctataatccaccatcttgagcgccttcagcgcccacgtccacctcagcagcgcgacgcaacacaccgccgctacgatctccagcagctgcagcaccctcacggccaagaacaagctacacggtggcgtatcgtacaccagcagcgtctggaactccctgcggtgcttccagtagggcgagtggcccacatcgtggtcgggccgtctctcggccaggtactcgccgcaccactgcagctcgccgaagctcagcagctccacggccgccagcacctgcgccgtgtgctcagcgccgagcttgctctggatctgctgctcctcgcgcgtgatgttaccgcagagccggcagagcgccatcttgtcctggtagccccagagctgcaccgagtccttgaagccctcgcagctcgtggcgatgcggcgccccggggcgcggtccgagtccacgggccagctctgcagcgggaagatgtgcttggcctcggcgacgctgcccagctggcagacctgcagccccttggcgtggcagaagacgtcgttcacctgctgctcgaagagcccctcgtgctcggcgtacgtctcggcgcgccacggggtctgcggccctcggtgcgacgccacggacgtcagcagcgcggcgtccaccagcgccgccacggccaggaatatggccaatagcttggcgaccttcatggcggcggcgacgggcaattccacccaatggagagcgagcagcgcggcgcccattgcagccaataggcagctgagcgccaccgcgctcttgtccagcggcgtgagcgccagcagcacctgcatctgctcggcggacgaggcgtggcgcacggcgtagagcacttcaagcagcggcagcagccccagcgacgacagcgccacgccgcccgtcagcagcagcacggcggggcgcttcgcggcggccacgggctccagcggcagcatggtggcggcagcgaggaggaatggggagtgcgcgatgcgtgctggtttcgaacccatactctcgccaagtctcgcagcacaaaagcgcatcccggtggcgattggctgaaaaaagcgtcaaaaatatctggatttttagaatgggtgtcacgttgtggggcactagccacgcgccgatgatgcacgaggtgccaatccccgcgatcgcctcgggctgtccacagcgcgaggctagcgctctcgctacaaaatgatgttgctccggcggtggcgtccacgacagcgacgacagttagcctggaagtgtacctacgtactggtaccggtacctacggtgccaggcaggaccgggcttgcaccgacctgattccgaccagagagcgggtcggtggcgcagcgtgtacactgcggtatctttcggcgacccgacccttggggcatgctgccaacggtcctcgctggtcgcacttcagtcactggtggttggtatctaaagatctcttcttcaagtcgctgcttaacgtccgttcatgtgcgtgcttagccgtccgttcatcgcgtccagaaacggccactcgatcagcgccaggttggtgctggtgtcgtggcacagcagcctcgagctcccgccacctcgagcctgcagcacgcacaaacccgtgaccagctgctggtttaacgtcgtggaggaggagacagccgccggtgccagttgcagcgagtgcagcaggcagcccgacgcgaaatcgtacatctccagccgcgacgtgatcgcgcgtgagcacaccacaaacacggggccccagcaggccacgagcgtctgcgctgctgtagcagccttgctcacgccagctgcgccgctcggttttggtttggggttcgcgctgaggtccttgcagctcgacaacgtctgccacttgcccgtgtccgatgcacgagtgaagacgtacacgttgcccttcctcgttgcaaccacgagcttcgtgctgcatgcagagaagctgatactggtgacacgcggagcgaccagtaccttggatagcacggcggtgccgaacgtcgccaactcttcatcagcttgcgtatcaagcctccgcaagaacaggcggccgtccattgttcccatagcagccgtacttccgtcgtcagaaaattttaccaagcacacagccacttcatcgtggactctcgccacatgcgtcaattcccgctcagcgtcatactctccacttggcagctccaccttgtacagcaatccaccaaacgcagtgcccactataagaagatattcaactctgtcatcaccatcgcctgtggatagacaccggcacttggtgatgtccatggagaccacgctgcaccgcagctgcaacctgaccaagacgcggaagtcctcgccgctgtagatcgccactctgcggtcatgagctgtgacaacaacagatccgtcgctcgcccagcactggcagaagctcgcgaccttctcccccgcagacggcagcaccttgcagacgcgcaggcagctgacctcgctatcgtgctcgtcgtctttccgccggctgttctgcagcaccaccagctctccaccagcgcccaggacactgcaaaggccgcgatcgtctcccgagggcgcagcgactgtcccgttccacgtcggaaacggtgggaacccctgcagcttggccgatcgcacggtcagctccgcgccatcttccattgcgaggcacccaagtgtcaacaaatacggtggtcgtacttagtgcgcacttagatattttgtctttctgtgcaaattacaatattttgctgacatatgaggaaaaataccgtaatttacatcactaggaggatactctgccggaagcatccatccatttaggcatggactgtgcttcagtaacttacagtccgcgcctaaatggatgctcccggcagaacaacgtggtgtcttagtgtctaccttacagcatgtaaggtaggcaccacgttgtaatatactgcagacatgcatgccttcgtcatcacaaaagggtctcgactatattgatgcacaaaagcctcaaaccaagccaagtcgacgataacttctcgagtcgtgtatttagaggttttgcatgggagcattaaaataatgaaactgcgggacgacgccaggcagcaggataggggcgagcgtagcacggaggtgtccgatgacgtaactccgatggacaagtccagatgccgacggcaccagggaacgcaggcacatttccaaaggcaagtccagccggaatgacaactttggccgggttaactttcatagcctgcaggttggagataacggttggaggatcaagcagcttcgcgagcgccggatacgtcttgctcagttcgtcaagcagatgcataatctttcgaccaaggtcgatcgcgcgaccgtcgacttgatggagcgtgccaatgccctgcatgaacgacagcaatggccataacttgaacagatcgttgacaatagtgcaggtcatccagtcttcagggaaaaagtctcgcgcggcggcctcgatctcttcgctcgtccttcagacaacgccgcttggttgaagacagtcatcacgactgaggcagtggtatcgcacatcgacctacagaaaaaagttagaaaacatcaaaaaacgagatggcgaagatgcactcaaataccatctcgaggcgcttgatcagttggacgaatttgcctttgatcctcaggcccaggtagttattcggaggcgcatgccgcataaggaaattgcagcgctcgatgacatcctcgtcagtgagctctccagcacgcttgagctcgctgaaaaacgtgagcgtttcggcctcgccgaggccgaaacgcggccgcctcgatgagttgggtgtttcgtgggatatctctccagttagtgtggtttgggagcacacttgcgtctcgcggttcctcctcttccttatcatcctccccatgaccggtgcgcgcttgattcatcctcacgctgtcgtcgtacttgtataataggcacagcggcagcgaacagcagaaatgatcagacttttaaaaaatggcatttgcttgccactgttagttttggcactcgtacttagtgaatacataggtacaggtggtacagtagattaccgactctgtgcacacgtaccctaattcgaccatgagattctccacctggggtttgctggccagcttggctgcaccaaaaaggaaaacgcgcgtcaacgtcttcaaggcattcgcacaacaactcctcattttcgtcggaaacgcgcgtcggcgtcttctaggcatcgtgcccaacaaccagcccgtcggaccagtcgtccctaaccactcgttgctcgataagggggcgaattccaagtcaagttcatagaacagccgttgcgagttgcggaaatagggggctgcttccagatacacacgtcacttccagtgcttgcttgggaagtgccaggcatttcaagcgtcggcattggagactctcccttgaaggtggggcagccgtgggctgcagcagcggaagagaaccgaccacagttcgacagacagcagcagaaagcgaagaggagaaggcagtcgacaactgggctagcactcgtcggacaggaaacgcggacggcaacttcccagtgatgcacgcggtcattggcattcgacgcgcgctgcgagtgggtggcagcggcatgcgagcgctactactggcgcgcaatgcattgcacttggcagcggacttggcactgccggcggatgcgttgaagctgcaggagtctcatgtctgtccaacgcgtcgcttcggcggtggcacaggggcagggggctacagctggagcgccaaggagctgcttactattggagtcgcggttagtgccatggcggcaattgctggtggcgaagcgatgtgcgaagcgttggatggagagcacgaggacaatggagaggacgactcggtggcccgacgcaaaaactgcaacttgtgtcacaacagcgacgacaacgacaccatgtccatgtacttcgacgctgagtacgaaccgaagaagctgctgggttgcggcacgtttggcgtggtgatgcagtgcgtgcacaaggagactgggcgcgtggcagcagtgaagatggtgcaggacattgcaggcaaccaggaggaggtggaacgcgagaaagaggcgctggaaaggttggaacgcgccggtgggcatgaaaatatcgtcgggtatgaaggctcgtactatcacaacgacttccactacattgtgctggagtacgttgcgggcatttcgctgcactcctttgtcgagaaacacagcaccctggacgccacgtgggcgctgaaactcgtctcgcagctggccagcgcactgcagttcatgcacgacgccgatgtcatccaccgcgacctcaaacccgagaacgtcatggcgctagtcaactgtgacagcaaaggccgcagcacgcgcggggatgccaatgagaacgaggacgtcacgctcaagatcatcgacttcggctctgccggacgcgcctcgcagccagaatcgtccaataaagctcgagctgcgactctatcaggaactcgctgctactggcctccggaggtgctgcagcttcagggcatgacgtccgcaatggacatgtgggcgctgggctgcatcctgtacatcctcatttcaggccgtcatccgttcgacctctcgggttgttccacagaggacgaagtcattcaacgcgtcaagaccgagcccgtgccgttcgtgctcccagtgtggcacgacgtccctgacgagaccaaggagctcattcgaggcctgctggagaaggacccgcgccaccgactgacagcggatcaagtgctcgagcacccggccatcgtcgaggccaccaaggaattgtaaagtagtggctgcatcaagcacccgtgtgttgtacccgtgcgtgtgcggtcgtccatgtgcacacgcctccattatctatcaggcaccttgaaagccccaggcccaaggtgcagtcgcagtcgcagtagcagtaggtacagtagcggtgacgaacacaccaacatggcttcacccttgtaacgtaaaatttcgcatccttttgtcaaactccatcaaaataatggcactaaatctcatcgctcattcgctactctaaccaaacatttatcattgttgaaaaggggaggcgtaggcgagaccaatccagcgctgaatggtgcgtgcacacctcgctcttgctcttgctccaagctccacgccgccctcatgactcaccgattgtatgtatgcacgctaagaagcagcagacccaggcgtcgctcgacgcgtggcggtaccagctccgcctgaaggacgcggccagccacagtcgcaacctgcagcgggacttccccgtggacctcatcaagcctccgctggcggctggcgcgttctacacggggctgtctgtacgccaggaggtgtcggacccggagcagatcagctttgacaggtaccggcggcgtctgcaggagttcgaccgcgaggagtacgggccgtcgccctccaagaggcagaaggtggcgttcgagaaggtggaccacgtgcgcgagcagaacaagcagaaccagagtctgctcaggaggctgcagagtgagctcagtggacgcagggatcgccgtcgtgtgggtggagctattggcttcggggtggtggagaggaagatgactgccaacgaggacaagaaggtggaggttgccaagcacgacgagaaggtcgagagtgatgcggagacgaaggtacgcggctgcgtcattggtgtttgtcgtagagattggttcgtaactgagagtgttttggtatatcaggaggaagtggagcctacgcagactgacaacgatagcaaggatgcggtcccggtgccaaatgcggtcatcaagaataaagaggaaaccagtatcaccgtcaagtcacgcgaagaagaaattgctgagcttgagggtaagtgtttattgtattttacatttgccatgtggagatagaactgaggtgctgatatgtgcgacttttgcagcgaaactccgagcgcagcatttgtcacggacatcggaagctgatcgactgttctacgaccgtcttgcagaacgcgaggctagcgtacgtagctatattcatttttgtgatgttggccatgtcttgtgtgctaatttttggtgattgtgctgcttgaacagaccctgtttgaggaggttttgctggatgagctatatgagctggctgaggacgtgtttgacgaagaagaagagaagtcccgcaataaggaattaccgcctgatctgcttgagattgtcgaggatgctctgcacgacggccccatggaggaagtgcttatccagaagtacaatgttgacatcacgcggcgccacctgcaggtcttgctcccggggatttggctaaacgatgaggttcgtgttatgaaaatgcaacgagaagaatactttagggttgctgactgtgctgtgttcggttgcaggtgatcaacttttatttccagatgatgagcgaccgggatgaagcgctcgtcaacgcgggcgtactgcccaagcgcagccattttttcaactcgttcttctacacgaaagtgtcagagaacggatataatttcatcaatgttcgccggtggacaagaaaggtaacgttcaagctacgattgttactcgttgctcgctataactaaggtatttgctgtttctgtagatcgacgtgtttgccatggacaaaatcttcatgccggtgaatgttggcaatgtaagtgcttcaccgtttgcctacaattccttggacctctgcttatatctttgggtggaactgtcaacgtgaactctagatgcactggtgcatggctgtcatcttcatgacggagaagcgcatccaatactatgattctatgcacggaagcggcgcagcatgcctgaaagtgttgttcaggtacgctaaccctcattcaaacggtcgatattccaaacgctgacaatcgtcttacccattccggttgattgtcgataggtatttgcacgacgagtcggagcacaagaagaagcaaaagttcgatgaagaaggctgggagctcgtgacctgcacgccagacacgccgcagcagaacaacgggtccgattgcggcgtcttctcctgcatgttcgccgactacctatcgcaaaacaaggtccgtgccgctatcccaacaatgattaactcccctatcgatagcgctaacacgcattgtctcctttgctgcagccgctgacgttgaagcagaaggacattccattccaccggcatcgcatggtcctccatgtcagccgaggctacatcccgctcgaagaagaagggctatagaagacgacgcgtgtgcagcgactcaaccccgccaaaggcctttcattcagcacacaacgacaatacctcgaacacgccttttgatgcgtaaccacgattcatgctctttcgtaagacgatacttagccccagaatgcctatcataagacaaagcgtctcacgttttccgatcaacgcgttttgactacatcttggtttttgtataccagtggctacattgcatatagtctgtcaaaacataagatagtttgtcggacactagtttgcgccatacaattggccaaaagtgttcaggtcacagcggcatcgttgccgcggacgcggtggcaacgttgagcgccgaaacgatgcagttgcatggtgcggtaggtaagtagcctcttgttcacacacgaagcgatgtgcctgtagttggccgctggcagcaagcttaaatatcggcataatgactgcacgaacgcgtgcatgcagtccgtggagctgttccactcagaggtgcagccgttgtagggcacggagttacgatgaagttggcagacgtaaactaagagggacaaatagctcgtaacggtactacatgtacattttaatgtagtaaattttatgcttgagcgtacatcatagtagttgtgaaggcgtggcagccagggaacggtgttgccagtgggcttcccgagatcctccaaccccctcttacctaatcattacagtccagcaacaaaatgcaaccacgtattctgcaacggcgataatacctagatcttatacctacgacgctgaggtgcggaggagctccacactgctgcgcgggcgctcggcgcgcgccataacgctgctgggctcgaccttcggcatcggcgagttactcagtatctcctgcaactaagccactgcctgcagccatgctttttgtcgatgctacagcgtagactggtttgcgtatgcgcgctctatccgaatctccatcttctatgtagtgttagtactttactgtagaaaggagagttggcgtggtggggtgaacgacaacagtcgttcaccccagtaaagcgaagaaacattgctccactacgggaacaaacggtcgcatgataactgtgctatgatgtccttacattccattcctggcaagtatatttaaatcttctagcaggaggttagtgcatggcgtcaggatcaaaggcccggacatttcaaggggcacttttcaagtgcgctgcctctagtaaagggggcaaaatgcgcacacagataaatcagtccaatttacgagccgagatgcagcaacactcgagactacataatacaatattaaccaatgaaattgctacatttgatttgtcgtcaaactgtcttacgaatgctcgacacaagtgagtggcagccagcgggtcgttttatttaatggcggtggagtcgctcgcgttgtctttcatatgtacgtgcaaggcctctacagctctgcgcgttgtgtgtgtgacgctcttggcgcctcctgcttacttgatcgtgaagccctcgctgcgcaggcaggccttgtgcgcctcgatgatgtccttgcagtgctcctcgccgttgttgacgatgcacaggtcgcgcgcctgcttggtggtcgggcacgagcagcagatcttcttgccggacttgcccagcacggggccctccttcacggtcgcggtgcactccttctcggccattatcacacttgcgctcggcgtcactcgttcagttctggtggccacagtcgtcgacggtcaggcagcgcagcgcgtctctgcaaccacagaacgagaagtaccgtgcaccgcaaaaggagcagtaccgtaggccgcaaaccgcaaaacccttacgtaatcagaatgctgggtgaaggtgtcgacgagatagcgatcacgaccgcgcagcgagaccacctcgctcaatgggaatgctggggctctgcatgtcaccatggtgaagttaacgatatcgcaattgttgacaagcagcaagtgtggcaaaagagcttaagccgctactttccatttcctcggcaaatacaaatatacacccacaggagtcctgttgcgtgggaccacacacctccgcctccagcttaaatatcggtccgtttcttgactcttcctcctcccttctgctcgatggccgcgcgactaagcgtcttggttacagcgcgtgcagcggccgtcgacgcgacgcgtgccgcagtggatgcaaaacgtcccggggacggacacgcgatgcagcatctcgccgtggctgtcgcggatgtgggcggccaggtcgccccgcgcgcggaacagcatgctgcagaacgtgcagttctcccagatctcctcgtcaggagctgacaggcggccgccagagccacggtctcccgttgacgaggagcccgacgcgggcggcgacgccactcgagccagcgggatgtcgtgcacgttctcagcatcttcttcattaatgaacagcatctccgtggcggtcacgaagggcgtgggccgccggaacctggccaccatcgcgccgcgatcatctcgctgtgagcgctgcaccgctctgaaccggatggggaagagcagcgggacctggttcttcctcttctcgagcgtcaagaacccgatggccttgtcgacctcccgtccgcctccgagcgggaagttctgcgtgaagccgacggcgcggtcgggccagaagctgctggtcagcgtgaacttggagctcgacgtgagcggcttgcggtcggcgatctggatcacgaacacggtctgctcgtcgcgcgtgcgcgaccacttgaggtacttggacacgtgcgtggcgcgcaggtacttgcccgagctcacgctcacgatctgcacgcgcatctcgtccaggatgaggcgctcgcgcacctccacgacgggcacgatctgcacgaactcgttgtcggcggattggccggcgcactgcgcgttgtagaagcacggcgccacgctctccttgtccttgcaggccacgtacgcgtcgtagccctgccagaagagttgcagcgcgacgtggtcgcgggacgtcgaccagggcgacgtcgtcacggtttccaccgacgacgacgacggctcggggctgcggctccggctcggcgcgggcgcgtcctcgggcgcctcgcccaggctgtccagcgggaagaattcggtcagctcgtcgtcgtccacgcccgacaggcggatctccatctcgctgcgcattgctgcctctgctgcctgcagtcgcagtttggttctgattgatacaacccgcagctcttccgcaactgaggacttggactgcgcctgctctttcggatgatggccgcgattgcgctgagagctttggtgcgacatcattggcggaaaagaatgatccagagctaggtgattggacagaatgtcgcggaagggactcgaaaaacgcgccctattccacccttgggtgcaacgccgggccgaaacccacaaaagcgggggccgtcgactgagaccatgaggcgacaaacttgaagtggagggcggagcgtttcgcacactgaagatctcggctcaaaggaacgtgctggtgttgcaggtggcagcattagcccattgcgctgtatcgagcaccaccaagcgcttcagttctcactccactccacctaggccagtggccatgggattgtgaaagagagaggtgtccccgtactcatgacggggctgacgccgccgctctcaatgcgttggccagcgaggctgatctggacgcaggcaacccagaggcaccctattgtgcctcgaccactggactgcgcagacgtgtttgccagtgtcacaacgcccaccagctgcagcatccacatctcgatcatatgagcccgtaaactgaccttccacggtgctctttatctcgtgtgcgccacacctctcaatccacatcgaccccaagttgatacagtacgccgaccgccatgagcctgaccagggcgctgtaccgcgagctggtggcggccgcgcggctgctggacggccatgcgtctctgcgcgcgctcgtgtcgacggacctgcgcgagtcgccgctcgcccccggctccagaacgcggctgccgcacgtggacgccttcaaccgctgcctgacgcgctacctcgggggcgccaacttctacctgccggacgcgcgacggccgccgctgcttcaaatcgtgcgcgaggagttccgcaagccgccgccagcggctgcaggagactcggacggcctggacacggccttcgtggcgctgcgggcgctcaacaacacgctggcggaggccaaagactatgagctgccgcccacgcagcagtcggaggagacgcatacaatcggcggcgtgcaactcgcagagtacgacgagctgttggcgaagtttcagtggatgcacatgtgtgttgaccggttgggtgtgttctggctgctgtaggaatgcggcgtcgggcgtgtttctgctggcgcatccgctgctggaggggatcttcagccgctcggtggtgattctgaccgagcacaagcccgacgggtccaaaggatacattgtcaataaagtgatggagaagccgctgggacgtgtgttccaggtgccgcccaacgtgacgagggcctttgggacgagtgcagtgcacagaggtggaccggtgatcacgaggagcgcagaggtgactaggcgtttggctgtttagagggtgtcattgccgatactaacgttattatgttgctggtgttatactaggtgctgcatggtcgagcagagtttggtggccagcggatactcacgaccaacttccccacggccgacgatccgagtctctttgtgggcgtggatcttgagacggccgcgcgggcgatttacgacgagactgccaagcagacggatttggtctttatgaacggcgtgtctgcctggtccccgggtcagttggagagggagttgaggcagggctcgtgggtcgtggtgaaggcccccgtgtcgctcgcgattaacgcacctgcagaattgtggcaggacttgatgcggactctcggtggggaatacgcggagatgagctgtatgccaccgatggaggaagagtgaacaataaagctaacgcacgtagaaagtatcaccccgaagcttggcgctggcttgcataagttctattgatacaaggtctcgacatctggcatttgcttgaacttcttccttgccacgaacaagaagaagcgcgtcacgaaggtgtgttggcgatcggtcggagacatctcaaggcactgcaggatctcccactccatcgagtcgtcattctctgatgccacccagtcgaacatgctcactcggttgctcggactcccaaatgtcaagaagaagagcaagccgtcgggtttcaagatgcgcgctaactgcttcatactgttctgtgcgtctacgagatcgtcgggcgaatccggggttaccagcttccagttggtatcttccgcctccgtctcgggcttgagtaacattgcatccaaacagcctttgtctatgacgcagtccaccgagctggactcccagccgttcatctgggtaagatccgcctccacgaagcgaacgccccatgcattttcctccgagcgagcctgcattctctcgatcacattggcagcgtagtccatggcgaccacgtccgagtatccgtctagggccatctcacccggtaggcggctggtgcccgtccccgcaatcagcacgcgtgcagtcttggagatatacgacgcaatcagctctcggatgtgcgagtactcacagtaccagtcaaactcttcctcggattcaaaccgcgcctcccagtagctcttcttgcacagccccatcaatgagatcttgcctgcgtatggccgcaccagctcagctcctgaggcaacgtccttcgtcgtccaagcgactgctccatacagaaaatcggcatcaccgtcaagttgctttcctcgtcgttctcccgtaccgcagcagcaaatatcacattagcaggcggcatatcgaccaaaccgaactctgccaccccgacgtaccttgatccgagagcattgagcacgtagtacgacatgtcgtccgagttcgctccaaaccggatggagaacgccagcaagtgcagatgcctcaccacgctctcgacctccttctccacgtcgctctcctcttcgctgtccagctcgtgtttgtcctcctcgatgactccttgaccatcgtcagcatcttgctgcgtagagctccgtcctgtcgcagcttcgactgcgcgtctagcaccgactgaaattctcactcgtggccaacatgcagcacttgcgacgctgctgggagcggcattgtcgacaccgcgcgcagcttgcggtggatggcgccgccccgagaggcctccgaagccgcctcagtggatgccacagcgtcaaaatcgctccattctccctcaatttcatgcacgcagtcgtacacttgccggtgaaggtgctgcggcacgttgtagtgctgcagctgcggcaggtgcagcgcgagccacgcctcggagtgcatgacggacgctatgatacaggaatggcatcgttgggcgtgcgtcagcggcttttgaaccatatgattggccaaaatcgaatagctacgaaagatgtttcagcgaatcatgagtcgtaaaacaggtttcgtccaatcgaattagtcgatagttgtgctagtcgcgtcaggtgaagcgacacgaagccatagcaatggagaccaagatcgagatggacgtctgcggcgctgtacagggcgtaactaagctccaagctctctttcgaggcaataagagccgtcgtgtgcatgtgcaacgtgcacgtaacaacttacgtgcgttaaatcgttgtcttcagtgctctagcggttcatatttaacacattttgctgcgttttgctgcaaattctgacgcagcctggtccccgttcgtgccagcaaagatcgaggctgtccgagcaatgctggaggtagcaggtttgcagtctggggagacgttggtggacatcggcagcggtgacggccgtgtggtcatcgaagcggcactgcggtgtccagagctcaggaaggcgagaggcgtagagctggacgaggctctggtggggctatcaagacgcaggatcgttgatagggcagtgaaggaggaagagaatgtaggtggtggaggacctgaggaggaatgcggtcgggacaagagcagcaatacggcgacaactctgagagaacgagtcgagattgtccatggagattttatggaggtcgacatgcgcgatgcagatgtcgttgtgctcttcttcctcccacacgaagatatcgcgcgtacattgcagcagaagttgcgtgcggggacgcgcgtcgtcacttacgtgttccagattgcgcagtggaagcctcacaaggtggttccgaccgtgcccttcatgacggagaaaggctcgtcgtccatctacctctaccacgtgcctcactagagctttgaatgttgttcgctgttttccgttgataagtacttcagataagacatgcatggcgggcttttttacgagattgtgctggggtagacccgctattttggtgatactcctcctgccatggtcctttgagggagtgcacaactcaatccgctctgctgcagacagaaatcggtagacgatggaggtcggctatgggatctgtggtcacaagaactcgttctcgaccggtgtgaagattgggaactatgtggaggaccgcatcggtgcggagctggctcggaacagctcggtcaagccgatcaacaagcattcggaacactccgcgagcttcatcaaccctcgagatatgcccgacaagtgcgcccacgctccagctgaaaacctggttgaacgcaacatgctgcgccaaggcctttcgtacgacctcattttcgagcacggccgagcccatattccgagcacagccgagcagaaggccaagttcaccccgacatcgctcgattatggcagtcgcttgccggactacttaaagagcagtgccccgagcaacgaggctgaacggcgcaggcagctagatatcaagagagcgcgggaggcacgcgaccagcgaaccacatatctttccacctcgcaggccatcattccaacccaagcaggttataggcgttgccactactaacgttaatactgcgtagtattctttcagcttcgaacacaacaaatacagccccggttcgtatgtaattcttgtagattaaagatgttgtacaatgtgcatgtcaagtaggataattgtacgctgctgggggcccgctgataaggcggaaatggccttcaaaatgcggttgagactacaaattgcgatcgttctccaagtattagagacacgtagttcctaccaactcgtcacggtcagaactccgagcttagagcggaaggctgggaacgaggtagccacgaagcaactcggggtggatcgtcctggtagctcgtatcatcagggacaccatttccagcttcttcttcgtcgccatcagccggaacctgttcggcacccgagttcgtgggcatacttcgatgcgttcggatctgacgcctcaatctggccgcgtgtcgttcttcgtcggtgtgtttcagtagatctccgctagtgttactccgcttccacagcatgtccgacagcgttgggctacgctgcgcaactttggatcgacctgacagactcggaggatcgcgctctgcttgcacttcgtccggtttggaaactactgtgacctcattccttggggtcggcatccatctaccgcctgcactctctcgtttcggactggtttggtccggattgtcgtctatcgcctggggtttactcctgatcttccgcagaattgcacgcggggttttgctgtcgctgctacgatcgctgagccgcttgttcagcgctgcggtcgacccgaccaatgaaggttttcgggaggtttggtcctggaactcctccttcgtgacgctaccagcgtcaatggagactccagactgataactaagcgctgccggggaggctagccgttggctgccgctgttgccgcggtgcagaccgcatccacatctggaacttcgtcgggagtcacgagccttgagatcgcttacgtcttgctgcaggcgtgcaatattgcccgccatactctccacaagcaggagaaggttcgccagcgtcttgtcagaattcactccgctcggggctgcggctgcagcttcaggctccgtgtctgtggacgaattcctgtctgttggaacactcccgtctgtaatagcttcagtcagaggggtgccgggtggaacgttcttccgcgagcgaatgctactgcgtcgacgttgaagcgtgtcgctgatcttcacatccgctgcgttggcttgacgtagtgacgagtcctcgatgaacctctcgtcgaagctctggaagccgtacttgatggtctcgtccggagcgttgatatcgatggcttcaaccaagatccgagccgcttctttggccgtcatggtggcgatcacactggcgcgtgaaatgtccttcttgccggtgctgcgccgcttggccgagactgcctcgatgatgttctcccacgggaacgggatcaccttcttctcgatgcagctctccagcatcgccgtcaaaacacgacgccggtcttccgggtaccgcgagatgatcttctggaactgttcgcgccccaagacgcacatttcaacgaatgtgatggctcggatgttcgccgtgcgcttgtagttcatcagcagactcatttccccaaaggcgtggccagggtgcaagtactcgcggtacttcttggacttcttcgcttccgtgccattcggggaactaggacaccgggtgtgggcgttttgaaagcgacgcacgtctgtgaagtcgctcatttgatcatccggtattccaaaggcgctaccggaaaacctcctcgaatccccagatgctccaaatgtgccagtaccgaagaacccctgctcctcatcatccgagctcacgtcgtcgtcgtcatctcccgtgtcttcgtcttcctcttcttggctgaactggttgaactccatctcactcgccaggccgaggtcgtgagaagagaacatcgttttgtggacgtcctccgctttaacctgcacgcacggtttggatagtttgcagtatccacggttgatcatcatcatttcgttgccgatctcgcgacgacgaaccacgtagtcgtcgggcatgtacacgcgtacatccaggttcagcacgatctgcgtcagaaagtcgggcgtgcagtccttccagaagggggccttgaccaagaggtccatgtgcttgtagagccccacctcgatccccagagtatgcgtgagttcctgctggaacttactcacgttgccatccagagcctcgtactccagccacacgtgcttgtagtactcgttcactcgatcacgtagccttaaggggagatccatcttggccatggtttcgtacaccgcctccatcttgcggtggtagttggtcgtattagcgttgaagttcgacaccagcatcgccacgttgccaaagacaatggcgaggatgacggaaccggtgatgatgaccacgcttgagtagagattctcagcccaggtgccgcccgaattaccttgaccttggattaaactgatggcgtagtagtagtcggcgatgtactgttcgcctacggttgagtagttcagtttgtgatcacgagacaccacgtgccagaagcacgccatgtagtgggcgatcagcagcacgaaccacatgagctgagcgataccaagcaggtgagagtatctcgagtaccgagcccactcggttaaattgctggcgatcttcatcacgcgggccagcagaaggtccttctcaaaaagggtcactcggaacaatcgtagcgccatgagcgtgatctgaattgcccttactgcatcaagcgtcgagtggacggactgcgacatcatccagtggatagcctgcactgggacagccgagagcaggtcgaagaggaaccacgttcgaatatattttcgcgcgattctcctccgtgacttaacgagaacgccctgcttgacgtacgccgtgttgaagttaagcagcaaattgagcaggtaaaacgattcgagcgagatggcgatcgttgatgttgtgaacgagccgtgggggaaatagcaggcgaatacgggcagataaatccactggaagtggtaaaccacgagcataatgagcccgtggatcgtggaagcccagcctttcggggtgatcgcagacatgagcgcttggagcagtttttggcgcgtcttggcgctggtcatggatcggatcgtgcggtggagcgagaatcggcgttgctgttgacctccgatggctttgtcgatgacagcgcgggcgaacgttgttgggatgcctaagctgctcgacatcttgcgaaggttgaatttcttcatgatggcatcgtggtgggcggctttctcgcccaacttgtacagatttcgggtagagctctggcgtttgagaacgccaacggagctctgtcgtttggcgactagaggtctctcggcgatagctagcgaaggagacgaagcggttgtcatttttactcgggggatgcgagagcgagagagtcgatgattgatgaatgctgtgctgggaagaaccgctggggcgtggaagtcgtactgtggtgacttttattgcatgggaggcgtcaagataatcctgaccttctttcttgccaaaagcattgatggcgtttcaaacgcaccgagaaatgctattactatcgatcaagcgccttgttttcgatttagtcggtcataagacacgacaatgctgcttcatgctctttcgtaagacgatacttagccccagaatgcctatcataagacaaagcgtctcacgcgttttgactacatcttggtttttgtataccagtggctacattgcatatagtctgtcaaaacataagacagtttgtcggacactagtttgcgccatacaattggccaaaagtgttcaggtcacagcggcatcgttgccgcggacgcggtggcaacgttgagcgccgaaacgatgcagttgcatggtgcggtagggtaagtagcctcttgttcatagttggccgctggcagcaagcttaaatatcggcataatgactgcacgaacgcgtgcatgcagtccgtggagctgttccactcagaggtgcagccgttgtagggcacggagttacgatgaagttggcagacgaaaactaagagggacaaatagctcgtaacggtactacatgtacattttaatgtagtaaattatgcttgagcgtacatcatagtagttgtgaaggcgtggcagccagggaacggtgttgccagtgggcttcctgagatcctccaaccccctcttacctaatcattacagtccagcaacaaaatgcaaccacgtattctgcaacggcgataatacctagatcttatacctacgacgctgaggtgcggaggagctccacactgctgcgcgggcgctcggcgcgcgccataacgctgctgggctcgaccttcggcatcggcgagttactcagtatctcctgcaactaagccactgcctgcagccatgctttttgtcgatcctacagcgtagactggtttgcgtatgcgcgctctatccgaatctccatcttctatgtagtgttagtactttactgtagaaaggagagttggcgtggtggggtgaacgacaacagtcgttcaccccagtaaagcgaagaaacattgctccactacgggaacaaacggtcgcatgataactgtgctatgatgtccttacattccattcctggcaagtatatttaaatcttctagcaggaggttagtgcatggcgtcagggtcaaaggcccggacatttcaatgggcacttttcaagtgcgctgcctctagtaaagggggcaaaatgcgcacacagataaatcagtccaatttacgagccgagatgcagcaacactcgagactacataatacaatattaaccaatgaaattgctacatttgatttgtcgtcaaactgtcttacgaatgctcgacacaagtgagtgacaacgctgagtcaaccccatatcctgaccccagactctcgtaaattgttgaatcatgagaagataccgggctgcaagtatagttctctcatgggaagttgcaggtgctctgaccacagtacgggcttttacgtagatgtgctaagccaacagcttgttcagcatcgcatgaattgaaacggtgaaaaaaatcagtttcaaatatcgtccaggaatggcagataatgcaagcgcaaggcatcttagcagcctgtcccagtgcattcgtagcttgctgggaataatcttcgaggtcctgatcgacagacagtacttttggtgcaagaatagctgatgaatcgttatagtaatagctactgtactcgcagcacagttcttcaatcatcattcttttctcttgaattgcacctcgtcaccaatacgggcaatcaggtctgcaggtagatcgcagtcccgcatcagtttttcgaattcgatggagtctcggtctgactcgtgaaaggtatcatcgggtctcacagaaggattgttgctgctcgggtgagtccacgttggcgcagttgtagacggttgcgctgctaaatgatctgtcagttcatgccactgcgatgaaaaactagtgagcgtcttcgactccatgagatggaggcacatggagagagcgagcgcgagtccttcggctgaaaatgcattatagaacaacaagcgcgttaaaaagcttcaattgtgcagtaaatactgcatcccgtacatgttgaggtgccccggcacagatcttcgatcaggaccagggagctcggtgtcattgccgaaaatatgtggctcatctcgcgcatttccgccataaatgtcgagtatccatacagttgctggtcgtacgctccagtccgcaagtaaattgcatcaaaaacaggcaatacggcctctttacacggcacgaaacagccgagctggttcagcatgaccacaatccccaaaagctgcaacagactggattgaccggatttctgatctccaaccagtagcaaaaatgtcttcccatcaaggacggagagcttgacagccacatcgctacggtcactggtgtcgctccttgcgtcttgctcgaaagggtcgaagatgtcttgaagttgaaacgtagtttggtggtcaggactgtagagtgcacgaacaaatttgtgcttgtgcgacaccaacgcgaagctcactaggacatccagctcagcaacacgaactgcgagttcgtccatatagccatgacagtttgcttggaaatctgacaccagcgagtcgaccaaacccgcctcagcgtcttcgtagctgcgcttcaacgacttccacttcgcccccagggagtcgatcgccggggttgagaaccagacgcctgatgctcttgacgcccgaataacgctgagcatcttcccgctctgttgttggactcggtggctgtcttggcgagaaacacgcagaacgatccccattctcgcaatagtaggctgctcgtcgtgtgcatataaaactttgatccggtcctctgcgatgcagagaaaagttgctgcctgcagcaagtatgcaaccagtacagaattaaacgtaacaaacaatcagaagtataagcaagttacacgatatacgtacctgcttgactgctactgcaacgtccaactcgcactgtcggatctgagtacgcaactcttgcaatggtaatgttgatgaccccatcttgctttctgtcgctgtgtcttgaccactgtcctccatactggtgaccacttcttggatcacgttgcaaaacggtctgagttgttgagagcacaggtcgtgaatcgggcgcagacgcgtggagaacaatgcatctaggtcaacagcacattctgtatcactcaaacagtgctcagctagagcatgaagttcgctcagccacttttcaagaccagaaaaatcctatgtacaccaagcacaacaagtgagaacaagaacatctgcagcttaaagctaaaatggcacaacctactgccaacgaaagctttgcgtcggtcgagttatctgccgtacatggcgtgatcgaagtgaataacgacaggtctcgctcgtaactttggacgtgctggaaaaggctcgagagcttccacaacactggactattttctgctaccgctgacatgactgcttccaccgtgtcgtgtcgctccttgagaacttccgggtcaatgctaggtactgccagccactgcacacacaacaaataaaataaaattgagaaactattatagctacaagaaaaaaacactaatgtaacatacctgttttaggcacattcgcccgcgtttggtgctgcaggatggtcccaagaggttcagaagcgacggcgaccgcgctttcgacgctgctgaggaagcgaaagcctcccgtgcagagttattgagcctaacattgctagttagatcctgatcaagaatggtaaagtgaaaagcgagttagtacgcactgcatcactttttcgtcttctcggtcgaaaacattttttcactgggaatgtcagtgtttcgaaagaatgacgtagtattttacgcggtggacgttggtggacaccctgttaggataccgttatcaaacgtcctcatagcacttcactcaggtttattcttctgctgttcttcgctctctggtctagatgaggttctgcagctcgatctcgtgccgcgccagctcgcgcagcatgggctcgtcaaagtacttgctcacgttcacgtcctcgctcaggcccttgcggcgccgcgtcttgaccatgaactcgcgcgccaggtcgttcacgggcgcgggctccagcggacgcagcacgacgctcgtgtccagcgggtcgccagggaccacggcccagtggtcgaacacttgtgtgatgaaggcttggccctgtgtgaacacgcgcaggtccgtctccaggccgaacgactcgatcaccggcacgaagccgcgcaccgtgtacagcggcgaaccagccttgggagcgtcgtgtgtgatgtggccacggcggcgactcagcacctggtacagtgaggacaccgtgtcggcggggcactggatctcgagcgcgtacatgggctcgagcatgcgcggggtggcggtcaggaacgcggagtaggccacacggcgggaggtcgggatcacctggccaccgccgcggtggatcggctccgaggcgatcgtagcgtccaggatcttgaacttggtgttgcggatcggctcgtcacacagagggccctcgcgacagctccactggaaaccctgcacgatgctatccttgatcatgttgagggacgacttgttcacctcagtggacagagtgtcgtcaagcagcacgttgggcccgttgctttcaggtccaaacgcccatacggagcgagctgcaagcgcatcccacttgtagttggtctggaagaagctggccacgtccttcttgctcatctgtttattcgggcacattcatattagaaccacgaacgcgacgaagtaattcgaacactgggcttcacttacgtccagtttgatagcacccgcttcgatatcttgtgcgagactcgcgtccagcggctcggaaatcatgatgatcttgttcttctggttgggcgtctccgcaaagcacctggtaaacagacagcagagtatcaatcggtcagcgattagcgccatgatagcctcagttcgcatgaatcacttactgtacagaagacgtctcagccacagtctcggagaaggcgacgacggggtctgccaccttgatttcaatttccgagtacattctccgcaggtcgtgaaggatgcagtcggcagccagctcgccggtgcagaggatcacgtgttcaccgctctcctccaccttcgtccgcacaagcgggtaacttttgctgattttacgcagaccctcgagcatcttgggcagctccgccgggttcagcggctcgacagccagcttcatcacggacgtggtgccaaatgcgatgttaatgggtcggaagatgccgacctcctcgtcctgcagaaggtcctcgtcggcgtctgtgatcgtggcgctcttcgtaatcgacgcgtcgacgccctcgagcatcacccagttacctgccgggatgcggttgacctggattttgtagcgtccctgcgcaatgcagacgctctcgatactccgcgtgcacatgtcctcgtcgtcttcagcgctgtaggcttctcccagcaccttcacatcctggttatcacggacttcacccgagtacacacggccgaacgcactgaacgtggtgccgtcaggcgacgagtacagcttcacaatgttgaccatcaacggcgccttggggtcgcagttctggatgccgcgaacgatgctcaattcggacgattggttgcctgtgtaaatattctccagcttggtcttcgccgtcacaagcggcgacgggacgtggttcaccaccatgtccatgaatccagtcgtgacgttgccgaagaacttgcccagcaccagcttcagcagcgggcgcggattcaggttcagttcctccttcctcaagcgcagacccaaggcacgcagcgacgccgacagctccttcggatcaccgttcagcaccttcgagtacattttgtagagcggctcaaggacgaactggatgaacgaccgcagagcaccagggtacggctacaacagacaaggacaaaagaacagcgttaaccacagttctaccgagcttcataatatctgcacacaacgcaccgattttttggtgaacgtgcgcgtctgcgggttgaaatacttgtcgccccagaagcgcgcagccaaagccgacggcggaacacccgggtacgtatctgcgtagatctgcgcgaacgactccagggtaaagctccatccatgctgaccggacgcaaagcacacattgcccacttccggcgacaaccgctgcttctcctggttcgccggcgtgttggcgtcgatgatggcgttcacctcctcgatcgtgtgcagcagcttgaagtacgcgtcggccggcggcagcttgagctcaataatcagccgatccaccttgttcaccaccaacacaatcgccacattcgcgcgcaacgccgccttcaccaacctctccgtctaaacaataaaaagaaacaatgcaacattaaaaaaaatcgccaccacctcaaaaagcaacccccagcaacaccgtacgttcatcatgacgccttcaatggcgtccacgaccagcaccgctccgtccgcgacctgcagcgccgccgtcgtctcatccgagaagttgacgtgacccggacagtccagcacattgagcaggtagtgcttgcccctggccgtgggcagcacgagcgacacgggcgcgctcttgatgctgagcttgcgctcctgctcgtccttcctcgtgtccgtgtagcgcttctccgtggcggggtcccacctgtccacgtgcgtctgctgcaccagcaggtccgtgaacagcgtcttgccgtggtggaggtctccaacgattgcgacgtggcgcacgagctgcgggtggtccatgaggctggcgaggaactgggtcgagtaggtcgtttggggcactttctgctccagcaccgagaaggatttggtcttgacgggctcgatgatgggcgtctcgatggtctgcgcgtcctcctccatcacgagcgtctcggcgtccccgaagacctcgctggcctccgggtagtactgcttgtcctcgtggaggacgatggcggactcgccgtcctccatgtgcgcgtcctgcagcgtcaaagtgtccacgtgccgtccggcgtcgtccacgtcgccgtcattgctgttgtcctcgtcctcctgctcgtgctcctcgcggtcggacggcgcgtcgctctccgagtcggacgaggactcgtcctcgctgctgcgcagctccgggccgatgtagttgccgaactcgtcgtacagagactcctccatggtgcggccgatagcgatgggttagcttgatgatagatagggggccagtggatatgtgacgtgtgattgggtggaaaagggaggcatcaagtgatatgattggaggatattagatggacccttggaagacgctttggaggacaggtttctagtttttaggatctagaattctaaacagtactgcgcctccgcgagttgggcggttgggttgggcgcgtagactttggcgcggcgatgcgaggtggacgtcttttgtttggctggtgttggtgggggtgtctggatggacccatactgcagtgtgagttgctgtcttgctgctgtggaggacacttggctgtgagacaggggtgtcctcttctgaagcttccagacgtggacgcttccgtccaccgcccccgagacgatcgtggagcctgagcaactcacagacagcgagctgatgcatgcgtcgtgagcttgcgggatctcgaagaccagctcggtgcctgcctgctcgtgcagcttccagaagagcagcttgccggcggttgttccccccaccgcgtacttgccgtcgctgtcgaagcaccggacctggcctgcagtgcggatctccatgctccagagctgctcgcctcgcaggttgaactgcagcagctcgctctgcaccatcacgcagacgtacgacttgttgtcggcggcgaaggctatcgacgcgatgccgcctccgtgcacagaactcgcgtctactcggttgtgaagagctgcagcgctcaaatcgaagaggtacacagagccattgcgagttcccgcagcaccgaatcggccgtcacggctcacgtctagacacaacacggactcctcgcagtctaggaacgtccggatgggggtcgcgacgatataccgcgacgtgtagcgccacaacttgatggttgaatcccacgaacttgtcaggaatcgatcttgtaacacgcggatggcggaaatcccgtccgtgtgcgccaaaaccttgtccaataccagtcccgtagacgccgagtgcatgtacacgcagttgtcccatgacccaacgaacacgacgctctcgtccggtgagatatcgcaacacgagagtgccgactcgctcgatactctacgaaattcgcccacgtctctggtcgacgacagcttcagagagctgtccttgctggtcgtgaacaaagtagtgctgtcctgggagaggatggtgctcgtgacttcccgtttgtggagctgagacgctgaaatctgcttccagctccacgaagtcgacaaactgaactttgtccttagtcgtaacctccacctccaattcttgggtagctttccagagcttatactcccccacaactgcgaggagaggccttcaatagccgtcgggaggcgcttccacggggtctgacaacacatcagactataccggtggcgatttcgtcggtgacggctcagcaggtcgtcgtcctccgtctcatcgtcagagtcatcgtagtcttcgaacgcactcagtgtgacttctctccgctgttgaagaaggggttcagacacactagtgagagggtacgagactcggcggacacggggaacgatgactcgcggtgacagtagcaagtctgacgtagccacttcaatctgtccttcgccctcgtttcgagacgggtgaggcgtcgagaacaacagcttcggcgtctgtccaaattcctggatctgcgattctaaagaacatttttgcacgggatcgtcgatggtttcgaggtccaccgatccctcatacgataaataataaaatactgcaaagcacgtaacaaacaacattgccaacggttagtgagctgaaaaatgaagggcttcatcccatgcaattacttacagttatttgccttgacagcttcctcgccttgctgcttgtagccaaagatcaggtcaatccaatgatgtaaatggtctgaaacgtagtcgctctcaagcgcagccctgttcttccggacaaactcagctgcatcgtcatgtgcccacggcgggagttccacgtcatcgacccggtcgaacttctgcgtagttcccaaatcgaggtgtttgccgttctgcagccattcgtccgctggtaatttacaatcaaagaactcgggaatgagctccttcacgtctgtatggttcgtcacacagccgtcccacgtgactttgatgctgcggaacaagcggtccggcgtgtcaaacttcccactctgtagacacaacatgtactcgggaaccttacgcaccaggaagtacagcacgtagcccggggtggaatagtgcgtgccatacaagaatggaggcggcattccctccgcttcctcgccacgaggcatcacctcatacctcgcattgaagtactctaatcgctcctcattcagcgctccgatgggcttggagaggtctctatacaccctcggatccttcaaattcagctccgagctcgtgtagtcacgtaagatccacgggaaaacggggtactgcgtcaggtcgttgcgagttcttcccgacgcgttgttcaggaacagcaagtagtcaaaattggagagctcgcgacgctgccacttgcgcatcatgtactgtatatccttgcgtcgacagcgctggagctctggctgccccaccatgagcgcgtaaaagtcgtcgcgctccttgcgagaccggaacgagaagaagaagctctctccgttgcgtaaatacacttccagtccgatctgttgcagcagatatcggcgcttgtacacttggtctacgctcgtgtactcccagttcagcacaggttcaaacacgttattcagcatcgcaggctggaagtacaggcgcagcgtggtgagcatgaggcagcccgggaacttgagcagtggctcgatgcggtcggcgacgcagcccgcgtctagcagcggccgctctcggaagtcgatcaacagactcggatcaaacttgtcggtcagtctcgtagccaatacaggcgctagtaagctctcctcttccgccttggtcagcatgcggcgcggcaggttggacacctcgtagatgacgtggatgctggccaggaacgcctcgagcgtcacgtgttgtagcgtgaagatgaacttggccggcatttcggctcccaagctgctgctactgctgctccgactgccgttggcactgctggcaatctccacgccttctgtagtgtccttgtagacgtacgggtggtcgatgcctcgctcgcgcatctcgatcacctgcttcgtctggaacgtcaggtacaccacgggcacgggcagctccgcagcttcaggatcggacgagctccgtggcggcgggtggacgaagcactcggccacgggctcagcactcatgcagcggaaggggaagcgcaggatcggcagctgcaggtctttaggcacgaagaacaggccgcgcgtgcagactttgatgcggcccgagactttgcggtgcgtccgcgcattcggctccaagtatcggcacgcgctgtggtcctgcaatgaacagcgttagtctatgggcccaagatatatagctcctcctgcgcgtatccttgcatttcttacgtctaggaagagctcgccgtcttcgagcagcaggaggctgaagcgcgccgtctgggcgttcttgttgctgcggcgacgtcggtgcatggcttggggctacagtggagctggagctggaggagatcgggagcgcgatgggttgcgacgccgcaccacggccagttctctgcaatcgcacgtaatattggcgaattagtggcgggcgataggtatggctgccagcggcgtcgaccgagtagtgtatggatggagttggttggttgggttacagctctgtggactgctaatacatttgggtcacttacttacttcttgctcgtccccgacgaaagatactaaaactgggggctggctatagctacttggatgatggtgatatgtacctgtgggcaggtcggctctcttcagccgaagacggcggtgcagctattcctcctgtccgcctcgatggctccgaaggtcgggatgatctcgtcgtgcatttcctcctccggctcggcttctggaacgggcgggagcatgcacgtcggcgctgtgggcgctgagcaggagcgcgtgcgcagcgggggcgtgttggtgtagcactcgccttcccccacgtacgtgagtctcgtgagcgagtgcaaccagttccgcttggagctcttgctgtccgccgtgaatatgacgcgctccccgttggccttgatcacgtagaacatgaggccgaactgcgtgggcagcgaggccccgaacagcgcgaacttcttctgcatggacagcgtctggcagtcctgcacgcgcagcaccgtgagctgcgccttgagccccgagttcctggccgcgtgcgccgccgagttgaacatctgcagcctgtggccgcgcagcaggcagtagtagcggcggtgctggaagaagggcgcgttcacggacaggctgaggaagccctgctccaggatcgtgtcctccggctggccggcgaagcgcgactcgcggtgcacgagctgcttggccagcgtctccatctcgcccagctcctcggccgagtagtggtagcaggccttctcctcctcggagcacacggggcgctcgaactcctccgcgtcctgctccgtgaagcgcacgcggcgctgcttggcgctcgtgtccttgagccccatggcttcaatgtaggagctccacttgacggctagaggggactgcgacttcttgagactcggggccagaggggacacagtggcggcgcggcgagctacggagaggccgaagggcatggagaggtggcggttctgctgctgctgctgctgctgttgctgttggtcctcgccctgctgcttgtggtcctcgggggtctgatcctcgtcgctgctgttgtggccgtggctcaggtcgagccacttcttgaggtgcgagcggcgcgactcgcggcgctggttctcgcactcgaggcggcgcgcttctcggatgaggcgcatggcggactgggagatggagggcaggtggagtgaagaggagtggagtggagtgggtgtggatggagctcaggagctgctgagcttctaccggtaggctgcgtgcgattggcgactgcgacgcccgggcgagttgcggagagatgcgggcggcgtcgtgtgctcgcgcgtttgactgcgggcgcggctttggatgattcaaccggccgcacgcaaggcgagtgaggcgagtcgaaggcgggtgtgagtgcgtgaggcttgcttgttgctgcgctggaccagttggcactgtcgtgacgaaacgccgaatgagctgtggccgcgagccggctgctgttgaagaagccggggcatacaaactccaagtgtcgcgtggctctcccaagtcggttgaactttctgctaagagtgggacgacgagagtgggacgacgagtcccactctgatccgagcccagcagctcaaagcctctgtcccgagcgaactgccccgacaagaaggcacgaacatacatgtgtgtggctgcggccccagctgcagcaggtgcttgcttgggctaactgtagattgtagtgctgcaatcccctgcgtcggggataacgttgctgcttggatacactgcggccgttgtgcaatgctagccctacccgcgccgtaccacgcaaattttgtccaataggagatgagacattacttgaaaatccggcgcaatagcggcaaaatgaggcggggcgccatcgtgttcgaagcaagcaggaggccgctgcgaacgcggtttcgcttggcacttgcggcaagtgagaggcatggattctagtggcgagcgtgaaaccttggccggtgttctcacggcactttgtggagagcgtttcagtatgaaacttttcatggcagaagcgatttatggccaatcgcgggccggtcaaaaatagatgcacatgactatgaggatcaagtgatgaatttcaagcctcggtcgaagtgtgggatacgaagtcgtcgttgtgtggacgatcgcaaatagctccgcaggtgtagagctttcgtctcctgtgcttttaaaaaggcaagcactagcttggataagttcttgaatcaagagtcttgattctcattttgcgggtcatgagcgcatccctttcgtgtgtgacacacaagagcgggcaaccatgcagaaatacgcgtggcaccacatgtctccgctggaatcaggcccatacaggggccaagtcaaagcggccaacttcaacatcttggcatcccgttaaacgcatccatgtgcctcacccaccttcaattctgaagctgtcaagtgctgatgctcgtcctgccccccccatcgacgtcttacggtaagactcttaccgagcagcattgccaccacagcccgatgccttgctgctgccagcaaggtaccgacggcaatgccatcctgaggttccaactatggattcgcctagtgtccattgatgcccagcgtctctctgcgaacggtgtgcgcaggattgcaatgcaccaccagcacgactgtcgactaatggtaaaaggtgctgctagttgcagggcatgaccagtagtgcggttgttgcgctgagctaaagccaaggagcacagctcctcgtagtagtggtcactcgctagtcgtcattggcaacgccaacgagctttcgagcctcgaacacgtgacttcttaactttgtttgttacatgtattcgacaaaggcgttggcgtaggacgtgtagctatctatctgctggtgtctaatgttttccactaatctgctgcacccagcggtttgatatatctcgctgcggcacgattcaccagatcattgaaacctcgattgcccgtttggcgtctccttccacagatcgcctggtctcgacgtcctatccggataggtacgaatcgctggctgcaacatacttagtattttgaaatatatctacaccgtctcgctagctgatgatttcgcgtgcgaatttgaccctcagacggcagcgcagctcggcaagttgggcaggaagcaactgccattgaaaaggggcgaagctgtgtgtagggacacaactagcgactacgagcatctggagagacgacgacgaactctcgtactggacccctgcgtgccacgacttccccaacatcgacagcacagtgaagctcgagtctccggctggaccgaagacgagcaacgtggcgtatctccttagcatctcctcggtgagagacgccaacgaccaggagctgatgaacctgaacaacattttcttcccggatcatgtcgtggaagccgagccgccgatgttcgtggcgctttgttccgatttcgcttcgtgtcaagagtttgtgctcacgtctgcacccgaaattgctcccgcgcggcgtgcccaggtcgattcgagtgtttgtggagtacagctttgattctaaggtgttttgatcatgcatggacatttagtaccatgctttgccattcttgttgaagtgcccattttcgaataattttgtcgaatcatatttgaatttgggccagcgcgcccatttttgtcaatatggcagctccgccgccgccacccgccgagctggagcctcctctggggccggtggtggtgagccacgtgaacgccggcgtggagttcatcgacgacctggtgcgcacgtgcatgcgccccatttctcgtaccaaatgtacccatttttgatgctctctgttcaggccagcgacgacgagcgcgatgagctcgtggagcagctgaatctgcacggcaactcgatccagtgcatggacggcctcgaggccttcacggggtatgggcgactggggtacagactatatggggctgtgtactgatgactggctgctgctctgtagcctcgtggagctctgtctgtcgagcaattgcatcgaggaggtggcgttccatgcgctgcagccgttggtgcacctccgcgtgctggatctgtcggccaacaggttagttagatttactcaatcataattattctgctgtggagaggctgactgcgttggtgttgctgttgctgttggtgcagcatttcgtcgacgcttgggttcccgcagctgccgcggctggaggagctgtccatggcccataattggtgagtcgggggtgctactccaagtctttatgattcatacattgaactgtgttttcttgtagtttgagtggcttggaaggtctgacgaggccagtcaagttcccaaagttgcggtacatggacctccgagggaacgagatcgcggagtttaacaatttgatctctctgcagcgtttgaaggtgttttgcttttccctaggtgctagcttaaagttttattttttggctcattgtggatgtggatttggccagcggctttcgcatattcggcttcaagcggctaatggcgaccaggcgaacccagtctgcgatctggacgactaccaccacgtcattatcaaggtgaggtaggcggatgaatcgcgtgaaaaggtcggtttgctgttccaattaatattcgctgctgtttgttgcacttgtagatgctgccgagactggagttgctggacgaagaggaagtagagttcttgaaggagatggggagtctgcacatgccaaagtaccgctcactcatgcggcgaattgccgagaataagcgcaacgaacagcatccaaggagaagccctcaaagcatgaagcaactgccagctactccggaacaccacggacgcgacggagcacgacatccgagcaatcaactccaccatggccagttccgtgcgtcacctccaaggattcagactgattttggtgtgactggcgaaccgaagaaagcaccaacgctctctcctcctggaaaccaatcacttgagccaactcaggacgacgtcgaagaagctaagcagcagtcacggcagcggctcgtcgtgaaggatagcggcaccaacaccgacgtggatctggagaaagatgtcctcaaacgcgagcaggctgtcgctgccaaagaaaccgagtttctcgaaaaggagaagtctttcctcttcaaggagaacgagttctacaccaaggaacagcggttcaagtcgcagattgccgatctccaggaacaactgagcgctgctgagtctcgagcggtcaaagctgaagcgactgtgctggaaatgtccaaccacctgatgcagaaagaaaaggatcaagcggctgcgactgctgcatccgacgaatcggcccacgccatccagcagtcccaaagtgaccagcagagcgagtgggaggccaagatttcaacactagagtcttcgcaccagagcgaattggagaagctcaacaccgacaaggccgatctactgaaaagaatcacttcgttggagacagacgccgctactaatacccagaaactccatgaagctgagcagctattgcagcagaagttgatcgcactggagaaaagtgagaccaaggaggatgaagcagttggagagctggagcttgctcgcaaaacccatgaagcaattgtcactcagctatccgatgaggtaaagtaccacaaagaccactcggaacaagctgataagcggaatactcagttggagaggcaagtcgcggagctgaaagccaacgtcgagaccgtgtacaacaaatgcatcgagaaggatgacgcgattcaacagctgaagaagaatctatccgctagacaggacgagattgagacgctgaggttgcaacacgtgaaagattccgagcgccaagacaaactgcagcagcaacagcaggatctgtacgaaagacagctgcaagcttccatcatccaggtggagatggagtttcgcaaggagtatcaacaatcagtgcagaagtttcagctgttgcagcgcaagaaccaggagcggttaaaggatgtcaagagggtccgggaggcgtatcaagctagtctccagcgtgaggctgcggccaaggcagaggtcgacaaactccaggcaatactcgcagacgacaagcagaagcttttcgtggaagatgccaagcgctcggacgccttcaaagctgagattcgtgcggagagagcgaagcgcaaagatctggagcgaaagctcgttgaagagcagcagaagaatgctcaagtggctacattgcaggcagagctcgatgagagacatgttgaaaactgcaagcttcgggaggaggttaaagtgtgtggagaacaacaggagtcctggaagaagctggaggacgatctacgagctgcgctgaaagtaaaggacgtcatgctcgcggaccagctacggcagattcaggagctgagcagcgaacggcaacaaaccgaagcgcaattcaataacgaaatgaacgaataccagacacaaatcgaagacttggaagccgcgctcgacgagagtcttcagaaggctgcagaggaggaagtgaaggcggaggcgctgagtaccaagctcgcagcgttggagaaggaggcgccaaagaaggacgaggagctgagctcccttcgagctgagctggagcagaaagtgtcggcgttggagtttcttgatcaggagatgcagcgcatgagaacagttctcgaaaagcaggacgagctgttccagaagcgcatgcagaaacacctcgagcagcaacgtgaagaggtggaacgtgtccgggttggagcagaggaggagagggagcatcagctccacggatgggaggctgagcgtggtggaatgatgcacaagtacgagatgctggctaccgagatggaaagcgtagcggcacagaacggcaagttgcgggcggctctggaccaagagcgccgcaaaaatgcccaaaacgaccgggatatgcggattttgctggcacaggtacgacgccagctattattcgactggttcttttgagattgttgctgacaccgttcattttactgcgtgtactgactgaacagatcgaccgcgagcgtcaatccaagaaagaaaacctgcggcagatcaagtctctattcgagcagttgcagagagaagcgtcgtagttttgtaaggtatctgtatgtgttagtatttagacggtgtgaattagaacgagtcctcgtcactgccgtcctctgaaaagtactccagctcctcggactgaacgtcctcctcgctcacatccgactcgcttctcaacgcccttgtcctcttcgcatcctcctctcgttcagcttcggcgtcgctctgttcgtcctccttttcagcttctgaagcggcagccggtggggaagtatcctcaccgtaatcactttcatgttccgaaccactaagttcatcatggctacctggtttatctatcggcggaggtgcttcctcttctccatcttcttcgtctccactgccatgagatacaaacgcaccgcggttcggattctcctctaacgtcgtcgacaccaccggaggtgtcggttcttcacgctcgtccgaccgcgacgcctcagccgccgagttccccaccacgctctcctccatcactgattcctccatcaaactctcctccagctcactctcggacgctgcgccctctctccgttcgctctcaacctctcgtgctatcgatatcggcacgggcgaaggttgtcggacttccgcttcgaagctcgtcggttgatccggcggaaggttctccaccagtcggtccagcagccgcttcaactgcgtctcgctcacgattcctggcgccaagaagcggccgttgtcctgctgcagttggcgcgtgatctgctgcgtctccgacgtccgcgtgagcatcggcagctccaccacatgcagcttcagcttccgggtgggtactggagcactgtccccatctcgatacacatagagggacgaagagctctggcccgttgcatccacgacgcctttgagatcgtcctcgtactcgagcgccagcgtcgggatcggcgcgtacttgagcccgaagcgcgtgggcacgatcataccaagtcgcaggttgaagaggctccgcgtcgtttcgcgatctcatggggttacagtagggttacactcacgtaacctcttcctgctcgacccagcagcgcacagaccgaccaggtctgttgcactgacaagtgtgactatttctggtctcctatacactgggcagtgttgctccagcgctggatggagacccgacacctcggcgtttagttgtgcgcgggcatcaacaaagtgtagccatcttgcgatggccgcggttcgacccatctccctggagcagcgtaaccctggcgagcagcttcgtaacccgctccagccagccctaagtcccagcaggaagttcgccgactcggactcggacgacgacggcgacgtaagctcgggctatagcgactcggactctgagtcggaagggtcctcctccgcccccgattcgtcctccgaagcgtccaactcatcggcatcctcacgtgcttcgagtgaccaggaggacgacttcgactccgattccgactcggaatccaattcctcgacttccgaccacgaagacgacgacatcggtggacactattcgtccgacgaaggaatagaaggtggacgctcagctgagaccgtctacttccatcaccaaccaactaaaacgctgactgagagcttggtggacactttgggggacatggcgcgcgccgacaacctgggctacatcgcgtggctcgtgcccttcacgggcatctgcaccatgctgggcaccgagttgctggcctgcacgacccacttcagctgctcggagaacttccccacgctctcgtacgccgccaccttcaagccggaggggtacgccttcacggggggcatgtgcctcaccgcgctcttcatcttcgcgtcggtcgtgctcttcttctggtacctgcgtctgcgcatggcagcgcagaggcacaaacttgaagacaagaggactgagaacttggcggcggggtacgcgtgcctggtgtccggggttacggcggcggtgtcgctcttcggtctggccgtcatggacatgcgtaaccatcacgacgcgcacatcaacttcaccatcgccttcttcgtcgcggcgtgggccacgatgatcgccgtgcaggttgccaggaagagcgtcttgcatgaggatgagacggcaggaggggacgggaaatccacagcaggcgcgacgggacttctcgttgtgctgcggaggcgctccttttggctgtctctgcgtcggtggaggcggttagacttcttcacggcgtacactctcggccgcctgctgctgactattggactggcgtcgacgttcctgtgtaagtttgttgagttgtagaagcttgtggtgatgagtttgttattgatcggtgctttgcatttgttttagttgcgctgtttttcctgtgcgccaacggagtgtggccgaacccgctgggctttaccgcagtgcaagaggctttctttgaggcgcttgcgattgtgtgccagcttctcttcatggggacgctatcctgtgagctggcacggctagcgcgcctggttgagcacagcgactacacggagctggagagaagcgagtagagatataatacatgtcgtttgatacactgaacgagttgactcacttgcttattcattagatgccagcgggtcgggtgcttacgcttgctggttcaggtactggacgaagaggtcgccaatggttgcgacagaacacggcctcaaccgcgtgatcttgatgtattgacggcggtggcgtcgagtctcagctgtagacagcggtctggtaagtctgagctcattgttgacagtatgcggcgggatacgcagaccgtcagccactccggcatcgcgctggtgagccagcaaggcgtccacaacagcgctcgtgacctcatccagcgcctggaggaaactcgtctctgcagcaggagccgcttgcgtggccagacccgccttcaccgtcttcccaaagcgaacagcgtccgtgatagcgtccaggggcacccccgttccgtccgcagaaaagtcctcaggcgtcaagcggaacagcggactgtcccatcggttcttctccaccggcgcctcaaatcgagctgccaattcctccagcaacttggagtcgatccgctcctcccgcgccgcattacgctgcaaggccacctccaccggagtatccacgtacacctaacaatgaacactcgcttcagtataaaacagtactcaccccagtcatcaaccaacaccaacggctgacgcaccacgcagtacgtcgtgctctccgctttggccttgcagaagagttcgtagcgctcccctttcgtgtagttgagcgcgtccagcaccacgatcgtctgcgtgttcaccaccttctccaccgccgctttcaacgcactgcgagtgttcttctcctccctgttgtctgcaatgcaatagagatgtatagtgcacggttagaacttgtgtggaacgcctgtgctccacccattccattccaaacgtccacttaccagcatagccctgcgacttgtccacattgacagtagcaggcgagatgcacacgacctcttgctctggagactggcgctgtagatggtcgaccaacgcagtggcgactgtgctcttgccagccgcaggaattccgcacaccacgacgagaggcatgatgcttgtcaatcgaccaaaaaacgcactttggctgtgtagccatctggcagcatggatgcagccatgtgtcaagagcacgtagccatatcttggaccaaagttgaagtgatttttgcgtgtcgatactgctgatctcgtgggctcaattctgtgaggcttccgcggcacggccagcgtcacgggctgtaattttagcttgatcgctatcatcggcatcgaaacggtctgctagtggacttgtctgcgtctagtggtcacaatcgcctactgtatcgctccgaggattttggctacctccacgacatgccgagctccactggcagcgagctcaacatcctgctgcgtcatgtacccaagatcgtggtctctcgcttcctgaacaaccccgagcggcctcgagggcccgagagcttctcgttcttggctgcagtggcgctcttcgacatctccggattctcctccctcggtagcagactcagcgaggacgagcgacgacaaagccgagatacccacaacaacagcagtagcaacagcacctcatcgtcctcatctactaccgcgccttcatctccatctgtggcggctctaggcccagctctaggtaacagaccacctctatcaagcaccccacgcagcagcagcggctcaatactccacaataacgactctccaacgaaagtatccaagtctcgcagtcctacggctgggaacatcttcagctccagctatcgagaactatccagacgagaagcatcatcacgacgagaagtatcctccagacgagaatcatccatgaaggccgaggatgagaaaagttttgaagacgacgacgacgagctcagtcctagcgatacgatacggagaagacaaagtggcgctccgtactcttcgtcttcatcttccagtatgaatttcgtccacgggcctaaaacttccattgcaacgcaaggaatcgccgtggagacgctcactacagcgctgaataaaagtctggagccggtcatcgacgtcatcctcaaacatggaggcgacatcattaaattcgcgggtgatgcacttatcgtaatgtgggagactgaagcttctcgagggaaagttacaccaagtggggaattggtatatcgagcggtttgctgtgcgttagaagccttacacgccctacaggtggcagtcactagtggaggaaacgacagcgagagttctcacttacagctgcttgggatgcacgtgggtatcggagtgagcgacatgacggggaaccacgttggtggggtgctcaaccggtgggaattctacctcagcggcgacgctaatcgccagatgagcatcgcagaggagaacgctcggaagggccaggtggcgctgtcgcccgaggcttttaatgcgctggagtcacggttcgaatctcttcctgaattggacgtggtctgccacattagtgggaattatctggtgaacgaagtaccgggagatttcccaccgtttgagccccatcgagcgagtttcgtatccccgcaacttgagccgactgcagacttggtcggatttcttcggtgctacgtgcctggagcgattgtgtcccacctgcaaaaggggctcaccctcagtccgtgtcgattgaatgttactgtcgcgtttgtaaaactggagggcgtgattgagattaaggacgagcagaaacagctgcagacgattcatcagaacttgtgcacgattcaagagtgcgcgtacaaggctcagggaatgttgcggcaatttgttatcgacgacaaaggcgctatcgccattgttgctatcggactgccgccattttttcacgaaaacaactgtaagtttttgctattgaatccaatagttgtgcatgaaatccaacatttcccatgcttgataggcttccgcggcatcaagtttgcgtcctacgtcctggaaagtggtgttaaggcgtcgattgggtacgtttattatgtttttagtccaagcgaacttgtactgacggtgtatttgcccatcgtggatagtgtaactaccggttctgttttttgcggctccgttggcagcaatgcccgtgccgaattcgccgtcgtaggcgactcaatcaacttggctgcgaggttgatggcagcagctcctgtgggggagatttactgcgacgatcggacgcacaaagagaccaaagactcggtgcattttcgagatgcgatcgagatgatagtgaaagggaagaccgagcccattcaggttttccccgtccagcaatactcgcaagccgaagtatttgcgaccgatctaccagacacggcctatcctgcaccctaccggtgtagcaacattctggacgcagtgccgctctttggttccgtgcccaagtccaacatcagtgaatcaaatgcactgcaccgagcgctagtcgtgtacggcgacagcggtacgggcaaaaccatgctcatcaaccacgtcgtgcagcgccattcactccgatgcttcaggggatgcggcgatagtgtggacacggctgtggatttccacgcttggcgaggtatcgctaaagttatggcaacaatcatggtgaaagcctcgcaacgcaaggtttcaataccgacaatcgatgcagcggggatcaatcgcgatagttccttcactactgaagaccccacggctctcgatcctgtcaaaagcagcaacttgacagtacatcgacccagccagcacggacgaccttcgcgggccagcaccctgacaactcatgacgagaacaacgacgatcctgagggagaagtcgatctggatagcagctttgcccggcgtatagtcgataacggcaaacctagtgttgtggaggcggcatccccgaatggtctgcgagttacagcgctggaatacttggttctgcaccagcaagtcacgaaagagacgctgaaaaagctgcgacactggttcccgtacgaagacccgacgatgacagcgccgacggaatcaactgcggagaagggggaaggagtgttgaggtctttccggcaagttttgttctctgtaatcgcagtggtgagcgcggcaaagcccattatgctggtgtttgacgacgcccagtggatggataaccgaagcttggggctggtactcaaggtgcttgaagagttgccgaatgtttacttcttgatcactgttcgggggatatccaagcataccgctagcgccagatcgatgctgctcgctctggtcatgagtctgccgactgtggacacgcgtcagatggactgcttcacgtaccaggagacgagtctcttcttgtgccagcagtaccatatcaccatcatggatacccacgtgctggactttgtgttcgaacgcacggaagggaacccggggtcgctgatcaagctgttgaacttcatgctggacgcgaagtacgtcgccatccagccagagagcaacaacatcgtgattctcaaagatctggacgaaatggatacactggtgccgcagcacattcgagcgcgggtcatgtcgatcgtcgattcactggacgcactcgcccagacagcgttaaagctgctcagtatcaatccacaaccaagcgaagagaggacggtcaacggcgtactgacgctcctgtcgacaattcataaggacgggagcatgagcgaggctagcggcattggaattggcctcaaagttccacgtccaacgtcggaagtctcgctgcttcgtcaagtgcgtgaaagcctcatcccgtgcgagaaagcgctgctgacgatcgacccgcacaacaaactgtacttcttcaacacggaagagatgcgtcttgtggtctacgacacgatgctaccctcccagcgtaaagttctccacggtttgtacgccgagtggctcagatacgcagccactaagtccggtcgagactcgatcgctcccccctcccttgcgacgggctccacgacgtccgaagcgaacttgacgaccgcagcggagagccccaacgctccatccactatccgtccaatgccgtaccagcagtacgctctgctcggctaccatctttcccagtccgacaacccgaaagaagcgttggaggcctattacctcgcagcggagggagggatggaagccaaagagctgggctttgcggaggaatgcatgcacatgtccaacaagatcgtcaacacccaccctcgaatcaaagacctgtgtgagctggatataatcttgctccggagccgtatcgagttcatccgcggcaccatcgcagtcgagaccaacgacttgactctagccgtcacccacatggcctacgtcaccaggctgtttaaccgcaagggcagcgtcctgcgccactacaccaacaacgtccagcgcgaggggctcccgagacgctcctccctcagcttcaccggtagtcgtcgtacaagtttccccatgtccacaacagttgagcccgtcccgtcaacgaaaaagtgtctcagtttgctgtccaagtcgaaaggcctggagaccattcaagctcgatgtatgcctcgcttgttcacgttcaacagtattttcccgtccggtctgcgagccgctggcccacaggggcgacagggtctgaggaagatgtcgacacgccccaagtcgaatcggatccaggccgagcaaacgctggaagctctggaccagatcaacttcttcaggcgaaaagcatcagccctcatcaagcagatcaactacgccaagaggaaggaggaggaaatgcaccgccacatccagaagtttgcccagcgaagcctgcaaacgaaagacaagcgttgacaacaattttgaatcgtcttggtccgcgacagaactgtatcaatgtaaatatgacgtacagcggatcaatactcctaaaaacttgaaaattattgagtgttagtaggaagcgggaagcgagcgatctgggtaccggttccaagctaaccaaaaatgaatgcttgatatacaccacttacactgtcgccctagctttccagctggagcagatccatgatagcaccaattttgctcttgtactcgaggtgtccaccgataatctccgacagatccacgttctcaacgccagcaatgtcgattggagcgatgccagccgagttcagtgcccagccctggtaccggtacatgatccccagcatccaatccttctcggagtacccgttgataagcctcccagagaccacgcgacgcgcgttggtccaatcgtctcgtgccaaggggacgggggatccgagcaacactgcgttttccacaattccgcacgcctcgtccagcgactcgctcttggcgagctccttcaggcacgagaagatcaatctggcacccataccatagccgatcaacgtaacaggacgcaggccctgctcgcgctggcgcagtgcatccgccagtaatttccccgaagcgtctgcagcgttcatggtaactgtccacgcgttgtcgatgatgtctgctaggcgaaagatgactcgcgggatcgccaccgcagcgaataaagccgcgagggccgtgtacttgacgagctcagtcgttgcgtattgtgaaacttgctcggccgcaaacgtgcgcatggacttgccaaagcgtcgaagccctgcttcctcccacgcgaggcagtactggtcaccctgagggaagcggtccttccatcgccacgcgcgcagcggctcgtgtttggtccccagctcccacactgagccgccactgccactgctcgtccttgcggtagacgtagtgctggaaatcgcgttcgagtcgctgttcaaactcgtaaagtcgctgtatcgtgcatcttggtctgctatggacatccgcgacagatctgcaatacccaacgggtcgttgtcggggctgcccgcttcaatgccgtatttgcgtcgcaagatcccgaagaactcgtcctcccgtcctttatagcgatccatgacctggtccacctggtccaccttctccgggttcctctgtctgtagaacgcgcgcaggtactccctgctgtccccccacgctcgccggaatcccctcacaggcgggtcatcgtcatccagccacccagacacgcaaatgtacacattcatgccgtcaccagccgacacgagatcaaagctgaagtcgtgaactcctctcgtcctcgtatctgccttcatgcccatcacaccggcacctgcagttccaaacagcaccgtcgtagcagtgacccccaccgtggagcccaccgccgctccaatcgtcactccagctcctcctagtgccgtcaagctcgccgcaatggcgggggcagccagtccgcccgtcacagccagcaacgcgcctccagtcaccgccgccgcgccgatcgcagcgttgcgcttccagtccccccagagcttgggcttggccgccaccttgtccagcggcatggccgtggcctcggcgaacagcgtctggccgatctcgacctcctcgcgggtgacgtccccccagtgcagctgcatggccagcaccagtcggcgcagcagcgtgcgcgcgcgggcgtcgtagcccacgctcttgaccgtgaaccacagcagccgcttgaccacttcgaggcggaagcgctcggtcgtgagcagctccgcctcgaagggggcgtccatggacccattattactactactattgttattactactgctcataatgggtccatgtctcgtcgtcttctgcttgagcttcttggtccagcgcttgagccccccggcggcttctcggtcgggcacgataagcgccaggaacggggccgggtccagctcctccagggtggcgctcgaaggctggtgcgccctctgggtcagctccagggacctggaggtcaggatgggcaggtaggcctcggtctgggcgctcgagagccccacgaagtgctcgatgagcagccgcaggaaggccctggaccagttcaagtcgctcgagccgtcggtgaccgcgggcagcagacacgcgaccacgcccgccacgccgcgcttctgcgactcggacaggaagtccatggcgaactcggaggcgatcgacacggcgcgcgcgcggggctgagcgggcggcgaggaggcggcgcgggagctgcgggagctcgagtgccgggcgagcagcttcttcatctcagttttgagctagtcgtgagatggatacttatgactcatataagttgacaatggatagctaaatgagatatagtggagatgggatacttatgtgtggaatatagctatttaatggggtaagtgaagccatgtgggacttaactagaggtaaatcttgaagcgacgtgcggtcacagtcggcgatgggggacaaagggttcctggtggatgcggtggcgcagttcgtgcagggcagcgagtggcgcgatgcggtgacgcacttcctggagtcgcactacaagcggttcctgtcggacccggaggacgccaagccgcaggggaaagtgacggggtactcgctcgagcagtacgactcgttcatggcgttcaaggaccgcgtggagcggctgctagagaaggtcgtgggcgacctgggctgctccgggcaggacctggtggacgccatccaggtgaacctgaagtacgagtcggcgctgtccaccgagaagaggttctgtatccagacgctgctcacgttcgacgactacgacgccttctgctcgcggatcagcgagtacgcggccgagaagcaaggtgcagtcagtacttgagcacttgaaggtggcggaatggctgttcgttgacactttttgctggaggtttagttgtcgggtatgatgctacccccagtggtaacgccgagatctccgagtgggccctgcaagaggcgatcgcgaggtcgatccttgaagcccatgtaagtggctactcatgagtcttcggggtaggaggtttgatgtaggatggtgttaaatgcaggcaagagggcagcttgacgaggctgaagcgagctggctgccctgggcggaagcgttcgtgcaaatgagccaggcggccgcaccagctgacgtaggcaccgcggtggaggagtaccctgatcaaggtgggaagaattgcggactcgagctcgcggatatatgaatactgatggcggttgttgtgtatttacagcgaagggtgtgcctgacgaagccaaagcggaaacaaaggacgctgcagaagatgaccccgaggagaagggagacgatcgaatgcacgaactagagaaaatattgatccgagaggtgagtatcagaggctttacaacaaatcatattcgctgccgcgaatgtgtgatctaactacggtttcccatgcttgtttttcaatgggtagaggttcaaagtggacttactcgtcgcgcagcggatcgcggatgctaacgcccaaatgaagaagcaaatgctgaatcttgcggcagaggctgtggatcaagacgaaaacactgacggcatgtctaccgagaaagccgcagaagaagagctggcaggactctttacgcagatcgaaacgatcggcgagcgtttaaaagatgtaaagtctcgctgcttcaaattcgaaagcgtgactcagcagcaaatggacaacatgtaagtgtgccgtgggtttacgtcgatcggtgattcaagcagctaacgactggttttgttagatatctctttcttaaggagaaaattcactacaagcaggaccttgtggcccaggaaagagacatatcgaccttcatcttcacgcagatccacgagaaggacgaagctctcatcccgctgatgctggagtggctgcttctcgagtcggagcagcttcgaacgcagaaccagatccaagaacacctcgcaggtccacgtgacgaaggctactggacgcaggtatgggatgaaacctctcaggcgttctactacgtcaattcggcgtcaaaggagagcgtgtgggagcctccttctgtcggatactatgacatcaaccaggagttccaagtcccgggtctcgaaaccgaagctggtccagcagcggatgcgtggacggctgctaccaatgaatctgctgaagaagttccttaccctgaggcgggtatagcggccgactcgaaagcttgggaagaaccgccagcacaagatgcatcggctgaaggtgacctccatagttctgagacccgtacggaagagaaggctccaacgctggatcaagcgtcatctcagctggacgcgacgttcgagcttaaaatcgacccgaacgcaactgaaatggttcgatcgctcgtctttatatgaattgcttcacggtgctaaaggtttgttggtttgactgtgtagatcgagatggaaagcgtccttgagcgtatttcgagagagcacgagcaggagcgcaagcgcttggagctggtgtttgagttggagaaggctcgacagaaggaggagctgcgcaaacgcaaagagaagaagcgtcgagagaagctggcaaagaagcagaggcagaaggaagaagctttccgcgacgaagctccgaaggaggacggacaggcttcagcgcagccattgccagctcctgtgacttcgcggaaggcggagacaaaacctgaagagagatcgcccctgagtatcaatgtacccggccacggtcgagtcgacctatcacacctgctgagcgatgcacacgctactcgtcatcggcagatgaaggggatcacgcctgctcatgagcgtgctatgctcaacccggcaacactacgctacctcacggagcaaatggtgattaagcaaccggaggtgttaggccagcaagttagcctacgcaaggagattgtgctagacgagtttgcggatgaaaaataggttaacatttactgctagtatcttgagaagaatgagtttactcacgctgatgctcttagcgttggcagtcagtgacatatttttctttaccgagcagtataccatagagcatggtgcttcagcaccgtccaacatgaaaaagctcaatcatttcagcattaatgaatacacgcagaatagagttggtctcgatcggacgtacacttggcgcaaaatgggagcgcttttttcaaggtgagagacgaaatgacctcgttggattttgatgggaacagacgatcacgggacgtcgttatgctgtagtatgcagtagcgacagccagaattacacccaagtaagttgatccagtccgtgtttagtagtttatctccatccaggtttgctgtaagagaaaaaagtcgtactcacggtttgggtccaactcgggtgtcctaactccactcgctcccttacagaatgaaggggatgatggctttgcgacgcagcttcttgtactcgtctccgtacgtcttgaagtatccgcggtgtttcttgagcgcccagtcggccatctgcaggaagcccacgaccgtgaacacgtagctggcggccacctgcgtgaagagcgagaagccgacccagccgagcacctcgaacgtgtagttggggcacgacacgagcgcgaagagcgggcccttggggatcgggcgcagcttggagccctcggcggggcgcatgttgcgcagctgcacgtgcacgcacaggttgaggaactcggacacgcccatgagcgccaggccggccttgacctgcaggtccgacgtggggcccgcgtactgtgggtggcacagcgggtagcccaccacggcgccgaagctccagtagtagacgcagttcttgaagaggttgaagagcggcatggtggggcggctgaagcggtgcacgaagaaggtctcgagctcgcgcttgaggaagtgcagcgaccaggcggccacgcccagcagcgccgtgtggctcagcggctgcgcgttggcgtccgcgccgtagatgaaggcggggcgcgcggcgtagcccagcacgaagagcagcgggcccaggtactcggccacgaacaccgtgcggtagccgatctgcgggcccaggtcgcggaacacgagcgtgcagccgcccttgacgccgtagtccaccagcagcttggcgtcgtccgtgagcgccacgagcgagccgtccgcggcctgcagcttgaggctctggcggaagcgcgacacgcgcgcgtgcttctcgaaggccgccttcagctgcgccaccgtgggggccgagcccgccacctgcacggagccgtagtccttggcgcgcttgccggccttgatcaccttgacctgcatcttgaactgggggtggttctcgtcggggaatgaaaatgacacgcaaagatcggacgagtgacgtaggtgtcaatgagttttggggtgtgtggccctggtgaaatggtgcagtcatttcaagaaatgtatcggactattcgatggactatttattaaaagcgcggaaagttgctgcatgctctcatttacgagtgctgtaaggggtggtgtattggtccacttgacactctacgtttgcttcgctttctagggatagtggcagcgagtgctgccgccctgctctttcgtttgcttcttcaaatgacgcaagctttcgagcttgacccggtattccgcttctgcctgcttctccaggtactttgccagcgccttgttggtctccatcgccgcatcacgctcagtggcgctgatactatgatctctgcggatggtctcactgtaggctttgacactttcggcggcgtgctttttcttctgtttagacaaatatacgagcattgcattgattagtgcatcgacactcccccagtaacgtctcgttgacttactgcgttatggtcgagaactttacccccgtactgaaccagcagcttggcgacgctgagagacttgacgtagtgcatgggcgagcacgcaaaccgatcgtgactggaggcgtctgcaccgtggctaagcaggagaaaaacaatggggcggaagttgttcgtgaccgccaagtgaagaggagtgcagcggccctgtaacagagaggtttagtgcgaaggcatcccatcatcacctctttctaacgccccacgcgctcaccagcatcgtccgaagcatcaagtctgcgtccgtcttctgcagcaagaacttgacaacctccatttgtcctcttgcgcaggcttcatgaagcagggacctcccgcttttggagtctcgcgcattgatggcgaaacttgggtcatcctgcagcagttctgctaatgcatccacgtcgccctcaatcaccaagtccaacgctgaagcttgtggctgcaagtcctcctcactgccctcctcaacaccatctgcagcaaccttctccttgttctcactcgggaacgcgagcaagtcatccaccagatctgcgtatccgtccattgctttgttgaaggcgtcgcttcaatgcgctcacacgtcgcatattccatgtccaccacataatatggtgttttgacgatgtgcaagctaaaacaaattgtggccatcgtcgccgatgttaatgatgatgctggctcgacgacttcagcagcttcgcactgggtcacgactcaatgttggagccattcccaacctccaaattgcacgtggcttggctatcaaaagtgacacggaggattggagcgattttaacagcgtcatcaaggtgaaaaacgagaagtctcccatacttcgccgcaatgtcacgactggctgactgtgtgttgaaatggttctgcaggagcttcgcaacatttcgagggagaacgaactggagggcgacatgcccgacactaaactcctgaaggatctgggctatgggtcgctggtgatggccattcgcaagaaacacggaggcatggtggctgtggcggccaaaatgggcacgcgcaaggacgaccacgtcttcgacgtgcacaagaagacgagcgctcgcgccaagcgccgccagaaacgacaggagcggatcaacatgcacgatttctattgaatacacttgaggcacacttacctacctagatactttacgattacaaagaggtgtgttcactgggtcacgatccacgagctgccgcggcttgctctgctctcaagaacttttcgaacacgcttgtcgagtgccgagacgtcggtgtacagcactagtcggccgatgcggaggacgtcacctttaatccatgcacgggctagaattttcgcgattacttcttgctcgacgcttccgctggtgctggatcggaggccagtgtccttgtccttcttcaaactgaagacagcgaagcgcaactcgcctttcgggtacttggattgaaaagcctgctgcatctcgacgagccaagaccgctcgaacacgtagcctcgtcggctcgacagtgatattgccagaggcatttttaccagcatttcttgatttgatgtcttcgctagatcgctcagcactccctgcaccacctcgccaaagcaaactccgagctctctgaatcgtacgctgcaggttgaaggcccttgagaagtattaaagtccgtggtcaggaagtccaagatcgcgtcgggagaacaccgaacgtcttggatgtcaatgtgagcgagatttggagcgcgccacagagctgcaagtcctcgatccgtgacggtgtgaaaagtcgatatgccgcttcctttttttactgcgctcgaggaccccagctcgcggattctcaacgaacgaagctgcgggcaattgtccgtcaaggccatgaagaaatcgtccttgaatacgccagggtcgatcatttcgtcgatctgcgggtaaatcagtgcgtcgcacggctgcaggcggtgaagaacaacgtccaaatgctccagcgccgggcaacctgacaagagtacattcaacccacctgtggagtattcgtgccgtcggatacggaatggtgcgcgcgtgttgtacgtcaactgcagccgcgtcagcagcggttttgttgtctgaccgaacgggaggaagaactcatcagagaatggcaccacaacccagctgaactcccgcagcgcgacgcacgacttgcagaacgttttccagacatcccgcgagacacacaaactctcatcacacgcaaccagcctcattccttcatgatacgatcgtttccacccatccaagtactccaaattcggacacaacctctgcaccgtcgacaagaactcgttggacgttccttctcgatcgaactcgcttcttgacggcactgtcagctgtctcaaccctcccgaagcttcgttccacctctgcagcgccgagtacagtctccagaacacaaagtccatattgtccgccactgcatctgcatacagccggtccttcttgggcagtatcaacgcctccaggtgcttgcagtacgtcgacgcggcatccagcaagtcccccatcgccaaatgatgcaggggcaccccgctcaagtccaaccggagaaggttggggcataatttgagggtattcctccactccacccactgcgagagctcagctgctgctgcttcggcttggtcgggagtcggcgtctgtccctgagcgtccaggtcccaccacagagctctcttctcggcggtgatggcgatcctcaagtccagcagcctctcacccttattgccacttaatagctgcataatgatctccttttcctgctcctgttcgtggccagtagtgaagttgagagtcaacacgcgcgtggcttcatggtccgcgcagaattccgcgacgatatcgcgccacgagcgacagacgcgcgccagacgctgcaagttgatagtggacggctcggtcaagagcgcggcaaagtcgggggcgctgcggccctccacttcatgcggaatgagctctggcgcagccgcgaacgagcagatctcccgctgcagcgctaatggtagcgactccatggcaaatatccgactgagacgagtttcaagtttttggaatggctttattgaagttcagggccaatgagaggagaggaatacgctgtttattttatgaattttgggaaaacatgacatggctacatcgactttgacttggtatctgggatcaagtctctttcgctcctctctctctccttgaacgcacttgtttctagctggctttgtgttgattttaggctcgacaatcgtcagcatttgacgacccagtcgaagggcgtcgatatggcgatatctcctcggtagaaagtgccctcgatcacgtcctggtatttccagttgctggtgaacactgcgagtttcgagataaagaacttgtcgccgccttccgcgacgttggtggtacccgggtgaggcttctcttgctccatcgtgagctggaatcgcagggtcgggtggttggattcgagttggtgttgaatctcttgaagttggtcttcccactctcgtgggtcacaagttttcggcgtgaagtcacgcagatggccgatgttcagcagcatcagcgcgaaggattgatctgagaaggtgccagccggcttacccgccacgagctccagaagtggcaggatgatcgagtcgaagtcccgcatgacgccgatcctgacattgcgctgctggatgatcgacgacttgcgctggataaacgggaacactccggcgcccgacgtgcttgacaatgctgcgatcgagatatccgagagatgggtcatgctcgcaagcgacaacaggcctcggtcgctgacacattccagagcttgcgggccagcgtacctaccggcctccgcgaagctgaagtgagtcaggtactgcgcggacttggacaactgctctaggaagtcgtcgtcgaagacgtccaggtcgattcgatgccgcggatgcagaaacactttgaatgatcgcagaaatggcaggccgcgcaccagggagcagagccccgctgacgagtacggacgagtggtatcgtctaaagccgcgatctccgctgccgtcaccgcttcaactggaactgcggcttggagagaccacgcacgtatcaactgctctgccaaattgctgctcgtcgccacgactcgaacagctccagaagaccgttttctcctgaggaacgcgtcggtaaagtcaaaagcgagatcggtaagtcggcacttccgcgtggcgccaaagggtttgaagaacgcatcggcaaatgggaccacggcccagttaaactcgcgcaagtcagaacagtttgcgcagaacttctcccacacgtcgatagacactcgccactcttcatcgcatagcacagctccccatccgtcgctaacgtacgtgagtttccagccgtccaagatttccacgttcgggcaaaatttactcactgcagtcaagaactggttcgataacgctgggatatgtggaatcaccagttgccgcagacctccacaatggccacgcatgaaccaccgctccaaagctgctgtaagatgcttgacaagagcgacatcatcaatgtcattccggtacgcgcccacaatcttcggcgcgcgcttgctccatctcatcggaagcggcagtacgagcgccttcatcttcaagcagtactgagacgccgcatccagcactttgccgagatcccgccgcgtaagatacgccatcttggagacatcgaggcgctgcaagttcggacaagcactgagcaacgctggccagtccaccacctgcgtcatctcggcgccgactcgtctggtggtgtggccgaagagtgcaactcggagctcaatcactcgtggaccagcactggtcacgtgcttcagcatggctgtctgctgctcctcggacttgtgcgagaggttgagcttgacggtccgctgctggtactgggccaggatctcgcccagcaggtcgcgccaatagtggcagaccaggcgccactccgctattgtggccagcggcgtcttgtcaggccgcgacagtcgtctccaccccctgcgcttcgtaggcagcaccttggcctccgacacgttcttgacggcgaaggacagcaccaactccatcacggcgcgaggcagcgtcgtcatgtccagccgcgcggccacgcgtacgctcggtacatcgcagagcttcggcttgggttgccatcgagcctcctccggagcttggacggcgggcggcggccgcttgagcgaggggctcatggcagggaggagctactctactggtcgcatgtgggcactaacactggcgacgtcaaacagtcggatctatgcacaggtagtcagatttgccccatcgacgagcataatagagtcagattggggcctatgatatggcatatatacacttgaagtgatctaatatttcgggctatagttattgtgccgaggcgatggaagcagagctctctagcatggacactagaattttataagacgagatcaaacagtgagtttcgagctgaccaacagcattcggccttattgtgaaatatagacgtaccctccttgggagcctgctccttcttgccgcccttggcgttggccgcgggcttctcctcctccttggcctgctgctgctactgcttcttgtccttgcggcccatggtggttgaagaagtggtgaagtgaagtggttctttgagacttggcttgcggtgcttgaggcgaaaaccagaatgaccgagaggtgaagcaacaaggcaattgccttgatcgcagtcgtacagccggttgcaagcacgagcgtgaggaggttggtttttctcggacggttgggaaacggttgcactcggtgcggcgagaaaataacttgctttgagaatagcgcaagttgaagtgggctgcccaatcgccgcttccgtttcggtatccggcaccgagcattcaactgcccgcaccagccgagggtatccttggcaccgagaccgttatacgagttcaaaagaagtcccgcgcgcgtctacgcattgccagcgtctagacgtgccttggagctagcgtcttagccagtgagccagctgaactaagtaccgactaagacgaggtactgtagtgagagcaccactagccaggcggtgttgagccctactggtaatggacagagagcactctgcttctgcccgtgcaagccgatgcccaagtagcaactgacggccaaggtttgtgtaatagctgcgactgccgactgctgtggtaatatgcggttgtgcactctaagacgcctaggtagcactacggagtcagacctgaaagagccaaaaccatcctgtttatattttatgctgcttgtagcagtgtggctattgtgtcggatggagatgacttgttatcgcaaccgcgacattgcagcggtggattacttcttgcccttcttgccgcccttctgcttctctgctgcagtgagttggttcatcacaaaggaacgtgagtgagtgactgggatacagtacaacgagtcaaggaaaagcgtgtcttcggcgggtttcctcaccttccttcggtgccggctccttcttgccgcccttggcgttggccgcgggcttctcctcctccttggcctgctgctgctgctgcttcttgtccttgcggcccatgcttgctgtagaggttgttcttggaggctttgcttgcggtgcttgaggcgagtttcagactgaacgagccaaagaagagcgagcgccggcaggatcccagtgtgccgcagctggcagaggtttcatcgacgagctctaaattagaaaacagcttcggctgttggaaggcaccagtcgagggcgtttcagttggagaggcaactcggttgtaccaatcggatattcctcagcaacgtagtcattcagtcagataataacggactagaattgcgtttaacgaaggatcgatgtactgcacaagattgctacgcggaaggcttggtgctggcagctcaggcacgctttttaaataaatgaccaataacgaagcgttgaacgcctacagctcggaagcaagcatgtagctacgacaattaaccagacgatttcaagtagcaatcagtggatctcatttgttgcggagttggtgggagatacttgagacccagatcgcatcaattggttaccaaccacatcgcttaggacggtgtcctaccggcagtcactctacctactacaccgatacgaggcaggattccacaggcactcgtgtcaataggaatatatttaattcattttgccaaggccatccgtgttgatattttatgttactggctgcatgctgcagctaatgaaggggatggcaatgactgggctgcaggcgcgattacttcttgcccttcttgccgcccttctgcttctctgtagatgacaaagcacagaacgaagataatgagtttccaagctcaaaagaacaaaaacgcagttggcactagtggctgggtcgggagtgacagagctggacgtaccctccttggcgggctgctccttgttgccgcccttggcgttaccggcgttcttttcggcggcaggcttctgctcctccttggcctgctgctgcttcttgtccttgcggcccatgttagctggcgagtgtggttcttgacttgaggtgcttgaggcgaaatccagaatgagagagagagggagccaaagagatgctcgatctccatctccagcttccctaggttcatctttagacggttttgtctacctgtttttgaaggggcgtcgccgtttgttatacttggatttagtatgcgtgttgttgaagttgcagtgacccgcatcagacgcgcaggatctcatgtcaagtgcatggcaccagttgcaagagaagcctcagcctcttgcccttatcacgaaacggacgcgtcgtctgtgatctgccagtggcaatcgcacttgcagttgtcgagatccatttataaccgtcctatctggctaggtatctttgccttgtgagtgtctctgcagccgcagcgcttgaggatctgttcattctgactttcgcctcaagcaccgcaagccaagttcccgagcaccacctcctcgtcaaccatgggccgcaaggacaagaaacagcagcagcagcaggccaaggaggaggagaagcccgctgccaacgccaagggcggcaagaaggagcaggctcccaaggagggtacgtcgagctgctatctcatgacagatgctagaactgaactatctcgctgcgttgatgttggtcagctcgaaactcactgtgtgcgttgtggttttgttgctacagagaagcagaagggcggcaagaagggcaagaagtaattgagcctacgcggtcatcgctgttcgacccagccactattagcataaaatatcaacggatagctttggccattaaattctgtgattgtggtgaggggtcatcttgagtgcaaactgcgttgcatgttgcatatgcaaactgcgttgcaaactgcgttgcatgttgttttggggttcctactagcaacagtaagtcgtacggcccagtactctgcttggcaaactttggcgacctctatcatcacacagtagagcttcagctcactgtaaactgctgtactgtaaatccgctcaaaaatcgtcttcttggcactcaagatgacccctcaccacaatcacagaatttaatggccaaagctatccgttgatattttatgctaatagtggctgggtcgaacagcgatgaccgcgtaggctcaattacttcttgcccttcttgccgcccttctgcttctctgtagcaacaaaaccacaacgcacacagtgagtttcgagctgaccaacatcaacgcagcgagatagttcagttctagcatctgtcatgagatagcagctcgacgtaccctccttgggagcctgctccttcttgccgcccttggcgttggcagcgggcttctcctcctccttggcctgctgctgctgctgtttcttgtccttgcggcccatggttgacgaggaggtggtgctcggaaacttggcttgcggtgcttgaggcgaaagtcagaatgaacagatcctcaagcgctgcggctgcagagacactcacaaggcaaagatacctagccagataggacggttataaatggatctcgacaactgcaagtgcgattgccactggcagatcacagacgacgcgtccgtttcgtgataagggcaagaggctgaggcttctcttgcaactggtgccatgcacttgacatgagatcctgcgcgtctgatgcgggtcactgcaacttcaacaacacgcatactaaatccaagtataacaaacggcgacgccccttcaaaaacaggtagacaaaaccgtctaaagatgaacctagggaagctggagatggagatcgagcatctctttggctccctctctctctcattctggatttcgcctcaagcacctcaagtcaagaaccacactcgccagctaacatgggccgcaaggacaagaagcagcagcaggccaaggaggagcagaagcctgccgccgaaaagaacgccggtaacgccaagggcggcaacaaggagcagcccgccaaggagggtacgtccagctctgtcactcccgacccagccactagtgccaactgcgtttttgttcttttgagcttggaaactcattatcttcgttctgtgctttgtcatctacagagaagcagaagggcggcaagaagggcaagaagtaatcgcgcctgcagcccagtcattgccatccccttcattagctgcagcatgcagccagtaacataaaatatcaacacggatggccttggcaaaatgaattaaatatattcctattgacacgagtgcctgtggaatcctgcctcgtatcggtgtagtaggtagagtgactgccggtaggacaccgtcctaagcgatgtggttggtaaccaattgatgcgatctgggtctcaagtatctcccaccaactccgcaacaaatgagatccactgattgctacttgaaatcgtctggttaattgtcgtagctacatgcttgcttccgagctgtaggcgttcaacgcttcgttattggtcatttatttaaaaagcgtgcctgagctgccagcaccaagccttccgcgtagcaatcttgtgcagtacatcgatccttcgttaaacgcaattctagtccgttattatctgactgaatgactacgttgctgaggaatatccgattggtacaaccgagttgcctctccaactgaaacgccctcgactggtgccttccaacagccgaagctgttttctaatttagagctcgtcgatgaaacctctgccagctgcggcacactgggatcctgccggcgctcgctcttctttggctcgttcagtctgaaactcgcctcaagcaccgcaagcaaagcctccaagaacaacctctacagcaagcatgggccgcaaggacaagaagcagcagcagcagcaggccaaggaggaggagaagcccgcggccaacgccaagggcggcaagaaggagccggcaccgaaggaaggtgaggaaacccgccgaagacacgcttttccttgactcgttgtactgtatcccagtcactcactcacgttcctttgtgatgaaccaactcactgcagcagagaagcagaagggcggcaagaagggcaagaagtaatccaccgctgcaatgtcgcggttgcgataacaagtcatctccatccgacacaatagccacactgctacaagcagcataaaatataaacaggatggttttggctctttcaggtctgactccgtagtgctacctaggcgtcttagagtgcacaaccgcatattaccacagcagtcggcagtcgcagctattacacaaaccttggccgtcagttgctacttgggcatcggcttgcacgggcagaagcagagtgctctctgtccattaccagtagggctcaacaccgcctggctagtggtgctctcactacagtacctcgtcttagtcggtacttagttcagctggctcactggctaagacgctagctccaaggcacgtctagacgctggcaatgcgtagacgcgcgcgggacttcttttgaactcgtataacggtctcggtgccaaggataccctcggctggtgcgggcagttgaatgctcggtgccagataccgaaacggaagcagcccgcttcacaagcctggaacgaaccgaacacgaacacgacttcccccgatttgtcgcgaaccgataaaacctcgcgaaccaggttcacgaggttttacaggttcatttgccgtcgttcctatgcgaaggaaccactgaaacggcccaaatgcgttcgtttattggcattgtggttggataaaattctttgctattgaaactactcagtgcggctttttgcgagcatcaaaccacgcccttccttcaccacgatgtacgcccttgctcctttcgacggatctcagcatagtgaggaccaccatcccggcacgatggaccagctgactcatcttcatcgtcgccgccaagtcacccttcaagaggactttgtccaagtcaatgggaagcctgaggagctctgcagcatccgccatgacgccgagcaacaagcgctagctatcgttgaacatcgcgtcgatccgattgttgcaagcacaagatacgagttcgagcacgccgcagccttgatggagcaaaaaatgcagcttcgccttgaggagagttttagagcgtctcacgcggcagcacaatcgacagtgtgcgatgctgttcaagcgatctctggtcgcgtagactcagcggaggccatcctcgttgaagctcgcgctcgtctggatgaggctctcgatattcatgtagccaactcacaattgatcgctccggaaaatataaggcaacagattgctgaactctgcgaagaaggtgttcatgaagctttacggtcggcgcaggtatcgtttaacgcagccgtcgaagagaaagcggagcgccacgcgtctctaattgagtagcggctttgggaacgggtcgacgacactcaacgccaagcgcaaaacgcaatgacaagtcaaatgagggctagcgaggatcaaatgcaagcacgacttgaagcattgttggctgcggcctcctcacacacggattcgagtgtcacttcgctcgaatcaaagttgggcaagaaaactatcgagttatgcagcactctggagcgctccatgagcaaaacgtcagtgcgagtgtgaaatgacacgatggaaaattggattttcatctgggcgcagtgtgattggctgaaattggatgattagatgacatggattgcgcgacaagtacaaggatctgggccccgacgaagactcgcccaggatgcatatcgaccagcgaccctggccgagtcgctaactcattttgcgactctggccgggtgtaagtctgggagatacgatcaagatatactcaagtcaagatgtttccgaccgaccaggcagaccgactacggatgggcaaagattccgtggaacgttgaaggaggtgatttgtacccacgactctacactggattttggctcggccgggatgtcgacgtcaaccgcagtatagtgaaatcaagtgaaaagcagaatgcatgtctaagttgcaggaagatagccacagagtaaaagataaacagagttcgttttcccccgtcggtgacaagtcgcttggagcagcctgccagcggaaaatgcctggaggaccgagggatcaagatgaagcgtcaagctaccatggagctgcttagaagtgccatgcctgggggaccatggggtctgtcgtcaagtctgaccgagactgagctgtggtgaccggctaccatggagttgcctaccggaagtgcatgcctgggggaccatggggccggaagccgcgtccgggaggaggagtattggagtgccttggagcagcccaccggaagtgcatgcccgggggactgagggtctgatgctgcgagtctgggcgtacggaagaacacgactctcaccgtgcatataagaaaaaacaggttaaataagcccttaataaagagttcgttttcccctgaaacccgcaagccaccaggaagagcaggaagcgcaggacaaccgggcaccgcggctaggtacgaccgtggttggatctctccctgaagtaagtacgccaagttaggtaaggggactggggcgtacaggcgtctcagggtgatccacctatttcatttcctagttgcagctgcattctcgcccagagcgaggtcctgcatttcatattatcgattacatctcgggcggagtgaatagcgccgcctgggacttggctggaagcctattgtgtggtagggtattgatattggttatttttcgttcagtacatttgggattggtgcgcgtttgaagtcgcccagggttgaccagtaccctggatacgactcgttagttgactggagtagtgacccaccgtccgagggttcgaaagaataagtgacggatatttgtatttgtgtataactctgtatttgtggttatcgtccagagtcgtaggggctacgtttggaagtacgtatcgcaccccgctcggaaacccaacagtgtacaacaactcaccaactcggccgagctccttggttcgaagacaaacgacccgagagggattgtcacaaggaacacacaccatctcgggcggacatcttctggtgtatccgcctgagaagttctaagagactttgttctcccggaacattcgcacacctgggcggaaaaggcgttcacccgcctcgcctcagaaatcactcgagaaaaaagttaatgaccgacttgatgcagctaaagtgcagatcctgggcgaagcgcacagtcaggtgctagctgctgttgctcaaatggagactcgggtatcaagcctccagcatcttgttgaagcgcaacagctagtagaagctgataaggatgaagtgaaagaggctcttgctgctcagatggagcgggtgctttatcacaaaaacttagcgctgagggtttggatgatccaattcagcgcgcgatccgcgatctggaagtacgggttgaaggtaccacacggaaacaggtgaatgaagcattatcaacaggaatgcagacaattgagcaaaagctgagcgattttaaacgccgcatgcttacccagcgaacgcacccgacaaattgtatgtgctgtagcactacatcagcccagaaagctagcttcgaagcaagctgtgctggtgtgcactgcaccacccatgattatggagcatgtcgctctgttcctgcccctgttaggctttcagacaacgaacttgacgccaacgctgagggtggtgattggagtggcttcgatggtaacaacaacaagggtgcgtgctagatcaaggcagtgggaagtcaaaaagcttcgggcaagtcatgtcgccgtcgtagacgtccggaagttccccaattgaaagtaatgaccccgaatgagtcgagcgtgcgaggaagatagcacagacagcggtgtcggatcgtgtggtcgcgcgtattcgagagttaaaaagcaggattgtcaggtagagaagtaatagtagcctccaatacggcaactatttgaagtcttttgcgttttcgagacaagaatgcccgaaacatcaacggcatcatagtgtaacgtgatcctagcacggtcaccgattacatggcccgagttgacctccttcatgatgagtagctgcgcgttcctttagcaattggctcgatggtaaacggtgcccacaggagttgaagatatccatgtttgttgcacagtttgtttatttgatcgtcaagtgatagtgtgcaacatgcaatgttgagcagaatataaatctatgcatgcaatgctacctagcattccttcggtcggggatgcagcaggacttgagtgtccttaggctagctcagtcgacagagataaggcacttgacagcgcaatttcccactcactttcaaacatcgccatggggttcaatggccccaagtcgatcgtcacgttcgaagggatagcgttcttggcctcatctggcgtgagcttgaagcactgcgtgacgtcaataaatccccgatttcgattcaggaaagagcacatatcaatgttggctcctgaaagcgaggcacgttgcgatgtcaccatcattcagctgaccccgaaatctagctcaatttgagccgacgaagctggaacagcgaacacgatacgcgcgacttgaggtaaacagcgataggtaccagtctctagcatccgcttccaaaagttgagaacagtctcaacatcggtcgctgatgtggctgccaaaagttgtgggtcgctgaaccaccggtccagctcctcatcaacccgaccttcgagcagcatctgtggggttggttgctcaggtgcccggggcatcgtcagcggcaagaagtcgcacagatcctctgacaacccacaattgtgatagaatgccgccggtactttcatcgcaggctcggcttccggaggttgaagagacatcatgatcgtcttgagtcgctggagaacaagttgcttcacggcgcttttgttgcgctcaatcacgccatcacttagatgctgggatcttccacaagcacccactatgcccatgagcatgccgtcgatatttttgtgggggtgcagcagcaactgcatttcccacacaaacgagcacttcttcatcgcttcacggcaagtgtaccgagagaagaaccgcgtttgaaaggcttgactcagcaggttccgtgtggtctccgctaacggcagtagctcggtggggtgataatgaacaacgtgctcttttgtcgaatcaaacttgacgagcggttggtccacagccacccggcttgtacacagacaagaggacgtctacttggctggccttttcggcttggctcttgacgttcacagcagagatggggacgagcagcgacaaaagctgctccatgagcttcttctggccggatagcggaaaggggttcggaggagcttttccgtctcgctcgaatttccttgtgcgctcctcgtaccacaactcgagcacgtcccagtgtttcacaatacggcgaaatacttgagttaaccccataaagcgatggggcttgtagtcgactagtttcctttccttgccgaccccaagagcgtcgacctactcagcgtaaaggctccccatcacctccaccgaccgaacctgataaatggtgactgtcaccttgctgagcaaagaacgcattccagggtttcgatcacctgtcatgccaaaagctgccttcgtagcggcattggtaagatggggccagcaccactcccactggaggcgtaatccagactccatcatccacttgacgtcgggtccgccgtccgtcgtcgccccaaagaaatctgcagttgttagaccgaagtcagctaggatctgcttaagccatcgcgcatacggttcccgaataccttagtctcgttcaccgtagagcggcttgaagtgacgagtcccaaggagaattgaaccaaacttccagtcgttgtcaatgtagtataggcggagaccgatgaacttcatccccgttgtttacaggtccaaaagtcggccaccattgtgaagaatttcacaccagggatccgattcacgcgaatgacgtgtgtcatttccaccacgccggacgcgtacagctccacaaccgcatgcgttatggtctgcctgttcacaacagctcggaactcttccttcgtgatcacggcgcgcagaagctgggattcatcccattccccgacaacgaacggcaaattgttgtgcacgacttgtagagtctggagtagcagacggattcgttggcagttctccttcgacgttgctgacgctaggattctggttactttttcatcccttgttcgtttgcgtgtgtcctcggttgcagtctttcccgacgtgataccgtgcacttccttcaagtgttttgtagcgcgagacgtcttcccaccgtacagcacctggatggcttctgcatctcggcaactgtgtgctgctaagcaaatccatcccaccaaagctgggtcatcggctgggtggacgcgtaccccccccccccccccccacttgaatataaacgaacgttcattcgaagtcggagggacgagcacaaatccaggctttgggcgatagccttcgacagctctctcaacttcagcagggattccttccggcgtgcttaccgctgttagccctgctgctgccgtcagcgatggttcgacaggctgcacgcgttcccagctgtagtgaacaacggagacgcctcatatcttgcccgacgagtaggcggtccttccgtctccaccagttgagccgaggggaagctagcgctgcgccgaagaactggttgggaaagcacgcgttgagccagtgtctgagacgattgtggtacacttgttgttgatagtatgcgcgtgggcgtatgagcacgttgcagctcgctggattggcgatacatgataccactgagaccaaaaggagtacgggttgcatgtgtaagttagcaggtcgtaaaccttaatgaaaaccaagagtgccataccttggaactgcagcggccaagtgtgcaacaattgaaggcggttgaggaaaggaaatttagggcgcttgtacaagtgctggagtgaacttgtgtgcttgcaggtgaattgaagactgctagtcagaagctaccgcgcacaaggaggagcgctgcctctccgttgcctgagccgtaagcggctcttcgtgcattggatcgggtgcggctgttcaagaagggaaagtacgcatcctggtggccctttcagccagttagagggaggttttgcgtgaacacgccactagtgtacccaaggacaggcatgccaaacgaacatgaaaaacccgaacctgccgtttttcttcactgcttcctgaggtttttcaattgaagtcggtatatcggtataccgtgttcggacgaaaggtcacgtgtaaccgcgaaccagaaaagttgcgtaccgtggttcggtttcctcaggttcgttccaggcttgccacttcagcttgcgctattctcaaagcaagttattttctcgccgcaccgagtgcaaccgtttcccaaccgtccgagaaaaaccaacctcctcacgctcgtgcttgcaaccggctgtacgactgcgatcaaggcaattgccttgttgcttcacctctcggtcattctggttttcgcctcaagcaccgcaagccaagtctcaaagaaccacttcacttcaccacttcttcaaccaccatgggccgcaaggacaagaagcagcagcagcagcacgacaaggaggaggagaagcccgcggccaacgccaagggcggcaagaaggagcaggctcccaaggagggtgcgtcgagctgctatctcatggcagatgctaggactatctagctgcgttgatgactcactgcgttgttgtttggttgctacagagaaacaaaagggaggcaagaagggtaaaaagtaactctttctacatctctgccatcgccatccatgccacattgtgccactagaacattaaagtatcaacacggatgactggcatattcaggaagtagcaaagtctcagcttcgctacctgcttagggagcactcgcagccttgatcctcgaatcctcacgcagttgaagttgacgacgcagaatcttgcctgacatggtcttggggatcgcgtccacaaactcgacctggcggacgcgcttgtacggcgcaaccttgtcgccaacaaagtccatgatctcttcaggcgaagctgaagcgccttcgcggagcaccacgaaagctttggggatctcctcgccagactgcaagtccttgccacgcacacagcacgagtccacgactgctgggtggccgtgcagcacgtcctcgagctctgcgggggcaacctgatgccccttgtacttggtcatctccttgactggatccacgatgaagatgaagccatcttcgtcgatgtagccaacatcgcccgtgtgcacgaagccgtcctccgtgatcgacttgtccgtctcctctgggttcttgtagtacccgtccatcatagccggcgtgtggatgagcagctcgcccacctcgttcggatccaagtctgctctattgctgattgacaacacgcgcagcttcgagttcggcagcagctggccgacggacccggggcggttaatctcgtaggccggcatggtcacggggccgcacaactcggtcatgccgtagccttggcccaccttgacgccaatgcgcttgaacacggcctcctccacctcggtgcccatcggagctccccccgctccgatgtacttgagagaagacaggtcgtacttgtccacgagcgggtgcttggcgaagaactggacgatcggaggcgccacgtacacgttccagaccttgaacttggtgattgcgctgaggtattcgtccggaaggaacttgggtaggatgatcgtcccccagcctcggtagaaggccatgtggaacagcagagtggacatgatgtggaagaagggcagcaccgtcatggagtactccatatccttctcggagtggctggccatcatggcaccggagaagagagcgcgacccgatagaagaacgcccttcggtcgagcagtggtgccactcgagaagggcatagcgacgatagcgtccgggtcgacaggagggaggttcgggaaggggacgtccttggccagcatgtccctggagtagcaacgaattagctcctggcgtggagcagtagattctgtacgtactcgatgggcatcagtgaggcggagatgtcggcgtgaccgatggtgtacacacggttcagctcgatgccaccgagcgacgcagccttgactgcagtgtcgaccatcttggagtgggtgatgatcgcagcagacttgaagacggacacaatcggcaataggttagttgagtaacacaaggataactaggttatcgattcctacctccgagtgcttgagttgatcagctagttcctcctcgttgaaaagtggcgacgcggtggagcacacaaccccaagacgtgtaagcgccaagaagatgaccgggtactcgacgcagttaaacgagtgcagcgtcacaacctgtagcagtgaaaccaaaacaatgttagcacggttatcacctacttctctggcccacataagacgccgacatgtcgtggattcgcgagcaacacacacgaacttgtatccatggaataccattggtttgtttagagccgactccgctgcatcttgaccttcctgtcctgaaccaactgcaaattgcgtaggattttacccgacaggctcgtggggatctcggtaatgaattcgacctcgcgcacacgtttgtagccggccactttggcagccacgtacttcatcatctcttcactggtcaaggtggcaccttccttgagtacgacaaacgccttgggaatctctttgcccgttttcaagtcgcgtcctcgaacgcagcaagagtctgcgactagaggatgcgagttcactacgtcttcgagctctgcaggggccacttggtgtcctttgtacttgatgagctccttcagtctgtccacgatgaagatgtagccatcatcgtcgatgtagccaagatcaccagtgaggaggaacccgtcctcggtaaatgcagcccgggtaccttcggggttcttgtagtagcccttcatcatcgctggagtgcggaacagcagctctcccgtcctgttcgctggtaggtcttctcctgtttcgaggtctttcacctttaattccgtgttgggatgtaaagtgcctgaagaaccaccacggacaatattcgggtacgatcgacagccgcagcccacgaactcggtcatgccgtagccctgaagcacttggatcctgagtcgctgcatgactgcacgctccacctctttgcctagtggcgctcctccagatttcacgtggttgacatgagagagatcgtacttcatcaccgttctcaggaatgtctctggtgtgaagcctggcagtacgatcatcggtttcctgaggtagagcgtgacgtggaagttcatagtcatcatgatgtggaagaatggcaacatgcccagcacacacccggtcttgctcaccctgtacgctgggctaaccccagacgcgtacattgccctcgcagtcagctccaccccctttggtcgaccggtagtgccgctggaaaatggtagcgtcacgacttggttcgcgtcgatgggagggaggtcggggaacggcaggtcttgagcaattaaatccctgatcaacaagaggttagcatctcaacgggtacttttgtcctagagcacctgtaacgtactcaatagattggagatcgaaggagcatctgctccgccgaatgagtacacccgcgagaggggaatcccacgcatcccagctgccgtcaccgccaccttggcgaatttcttgtgcgagatgatagcaactgcctgcaacagcgtcacagggtcaaaaagctcctctaattgaactccagcctcgccgaactcacctctgcgatctcgatttggccggccagctccttcccgttgaataatggcgacgatggcgagcatatcgccccgaggcggttgagcgccaggaacaccaccacatactcgaggcagttgaacgagggcaggatcaccacctggaatcgacagaaatctagtaaaccattattaaccacgatacccagtcacttttccacgtacatcgcccttcttgctcccgttggccacaagacccgcgcacacttgcttggcctgtcgaagaagccccgcgaacgtgagcgtcctctccgtcagtccgcagatgaacgccggccggtcgccaatatcccgcgcgtgctcctccacgacgttccagatgcaggcgttctctggaattgacagcgtcgggcacttggaccggaagatcatctctctctctctctctctctctctctctctctctctctctctctctctctctctctctctctctctctctctctctctctctcgctcgctcgctcgcttggctcaaaggagctcgacacttttgtcaccaagaatccgagtgacgcagcaggttgtcctttttcaacaccagccacccggcaatgacagcgctcgccattagcaagcaagcgccacagaacaccggcgtcgaactcatcaacacgaattaaatggcatacatttgggaatgactacagtgttgcagtggtgccccacctcactcggatcaggacgcgagtcacaggcggctccgaagcgaccgagcagcctcaatcttctcgtcctgttggagctgcagctggcggcggaggattttaccggacaagctcttggggatggcgtcgatgaactcgacttcgcgcacgcgtttgtagcccgccaccttcgacgccacgtactccatcaacgcctccgccgtcaacggttcgtccccattgaactttagcaccacgaatgctttggggatctcgtcacccgtagccaagtcgagtccgcggatgcagcacgagtccgcgacctgagggtgcgagttgaccacatcctcgatctctgcgggggcaacttggtggcccttgtacttgatcagctccttgatgcggtcgacgatgaagatgtagccatcttggtcaatgtagccaacatccccagtgcagatgaagccatcttgagtgaagatctcgcgagtagcgtccgggtatctcttcatgacgcccggcgaccggatcagcagctcgccacgttggtttgcacccagatcaactccagtatcaaggcatctcacgcgcagttccgtgttggggagaagtttccccgacgcaccgttgcgaaagaccgtctcggacgaatgggtggcggtgccagcgagctccgtcatgccgtagctctgcagcactgggacgccgaatcgactgtggatggcgtcgacaagctcgtcacccagcggtgcagcgcccgaacccaagcggttgatggccgagagatcgtacttgtccacgagcgggtgtttcgccaggaactggatgatcgggggcacgacgttgaccgtgtcgagttggtacttctcgatggtgcgtaggaagctcccgggctcgaatcgaggcagcacgatcgtcgtcatcttcttgaagatcgtcacgtggaagatcatgatcgcggcgacgtggaagaacggcagcactgcgagcatgtagtcggtgtctcgctccagagcagccactcgagcgccacaggcgtacatcgcacgagctgtgagctcgacacccttaggacgaccggttgttccgcttgagaacggcagcaacacgacgtcgcccgggttgatggcgggtaaaggtgggaggggcagcgtcagagccatcagcgctctacgatacatggttagtggtttaatgtacacaaaatgaggagtgatttatggcacttactcgatggtttgcagaccagaggtacctttaggatggccaagggtgaacacgcgcttgagtgagacgctagtgagtgttgcagcttggactgccacctctgcgaacgcgacgtgcgagatcaccgcggatgcctggcgagttatgaatggttagtagtttgcatttggtggagaagttgatggtgctgagtgtatgcctgtaccttggcggatcggatttggtctgcgagttcgtcgctgttaaagagcggagaggacggcgagcagactgcacccaagcgattgagtgcgaggaacaccacggggtactccagacagttgaaggagtgcaagatcacgacctgtttcagtagagaagtgagcattgtatctcaaaggccaagcaacggatgcaagcacgtacgtctcctttcttgatgccgcttgccagcagaccggccacgaggaattgagccatcttgaacacttccgcgaagctcagcgatctctctgacatcccgcagacaaacgctgccttgtcgccattctcgagcgcgtgctcctccagcttgttccagatggctgcgtcctccgcgatgtggacgtctgggtacggcgacttgaagatgatggtcatggtatagcacagtagacgaattcactagtcgaggtgagagaggccactagggactgaaggaggcaaattcagaagtgacgatgagttggcactatataagccattgcccttgtggtgctcaggactatagtgggaaaacttactgtacgaccttcgatggcacaagaagtgttgcattcctgactgaagaattcgatgcagtctagataccactaacacggggtgatttcgagcctggcgatgcaacaactcagcacaataccatactactacgtgtgttcaacctatccttgcggtaacctccagttggggtcatatacggtacagatctgagattggatctgacgtgctaaaaggtgttctgggggttgcacccccagacccccgcaaaaagaaaactaactccgagttgcggcaacgggtccgttcgctggaatgctcgtcgctgggcccgcctccgcaaataccgcgcgggtttgctatggctacgctcctcgcaaccgctcactgccgtaacatatgtttttcaatacaaaaattagtattaataaccgatccattctctgatctgtaccctatatgatcccaaccgggttttaccatccttgccatactctgcttcaccttccaacttacagccgactctgggtcgccttcatcttctcgttctgtcggatctgcagcacgcggcgcaggattttgcccgacagactcttgggaatcacgtcgatgaattccacctcacgcacgcgcttgtagcccgtcactttgcccgctacgtactccatgagctcctcctcgctcaacgtttcgccctccttcagcaccacgaaagccttggggatctcctcacccgtagcagggtcaaaccctcgcacgcagccagagtccgcaaccttcgggtgcgagttcacgacgtcctccacctcggcaggcgccacctggtggcccttgtacttgatgagttccttgagacggtcgacaatgaaaatgtagccatcttcatcgatgtatccgacgtcgcccgtgcggacgaatccgtcctcggtgaaggtaacgcggttggcttccgggttcttgaagtaccccttcatgagcgctggggtgcggaacagcagctctccagtctggttcacgcccagctcctctcctgtctccaggtcctgcaccttcaactccgtgttggggtgcagcgtacccgaggcaccgtcacggaacgtggatgggtacgagctgctcgcacagccagcgaactccgtcatgccgtagccctgaagcacttggatccccagtctctgcaggaccgcgtgctccacctccttgcccaaaggggcccctccagagcccacgtgggtcacgtgagagaggtcgtacttgtccacgatcgggtgcttggccaggaacgtgacgagcggcggcgcgaggttcagcttgctcatcttgtacttgaccacggtcttcaggaacgtctccgggtcgaacccaggcagcacgaccatggtcacgcccttgtagatggtcacgtggaagatcattgtagccatgatgtggaagaacggcagcatgcccagaatgtactctacctcggcctcccggtaggccggtagaatgccacacgcgtacatggcacgcgccgtgagctccacgcccttggggcggcccgttgtgccgctggagaagggcagcgtcaccacttggttggtgtcaataggcgggaggttggggaatggcagattctgggccaccaggtcctcgatggacttgagaccagcggggccctcggcttggctgagcgtgtagatctgcgacagcggcaggcgccgcagccccgcggcctccaccgccaccttggcgaacttcttgtgggtgatgacggccttggcctcggcgatctcgatctggtccgccagctcctggccgttgaacaggggcgaggacggcgagcagatcgcgccgaggcggttgagcgccaggaagaccacgacgtactcgaggcagttggacgagtgcaggatgaccacgtcccccttcttgaggccgttggcggccagaccggcgcacaccttcttggcctgctgcagcagctccgagaagctcagggaccgctccgtgatgccgcagatgaaggccttcttgtccggcatgtcggcggcgtgctgctccaccatcttccagatggatgcgtccgccggaatgggcagcgtggggcagcgcgacttgaagatcatggtggacgtgatggaggtgacgggggtggaggagactgacggactgccaccgagggcgcgaatgcaggaatgacaccaaggcagttgaagcccgagtgttaaacggagggagggtagtcaacccggattggctgataccaagcagttggggataacttcaagttgagagggatcggcgcttgtcgactcaacacttgtccgggcggaagctgtagttgagacgacaagaatttggcagcttttagggcgaggcgccccattacgaggcgtttgatcggccaaggaggaagctgccggtgccagctcgcgttgaatggatagatcgagtcgatccgcaggtagatagatgtccatgcttgatctgcgatcaacactgcactggggactcctcagcacggtcccaactgatgcgcaaagctgatcgaaaaggaaacaagctcgagggttctgcccaactgaagacggccagtgagcaaggccaacgcgtgctggtgatcgacatcccagtgcatctatctcccacaaaggatttccaagtacatgtacctacgattcgtaggctacgaaccgtggcacgatagcatagcaatgcgtgcccagcaagctgtaaaaagtatatggcacctttatacagacctcagaagtattacgatcccaacactctggcacatcttggcgaaaacccaatgacacaattgcgcagagaagtttgaaagttccggctcactgaaagtctagagctgtggccacacattactagtgccaggaacggcgacagaaagaacacaccacatccttatgacgtcctcgttaagatggagggccgaacaggcaagtcgcgagcgtgcaagccctgcgagaatgtaaataactgcaccgaaaactcactctcaactcacgacctgaagcaaatccattgtaaagcgccatctgtgcgaactgaagttgacgaccgacacaaagggtgaagctgcttcgctgaagaatgcccccgcgtccttgcggtaagcaatgatgagcaacgggatcaagcgaacgcgttccgcacgaccacaacacccatgctaaaaaatacaataagctcgtaaaaaactaaaatccaaggggccacggagctacaattgtagctccgagagatccccatttccctctcgttgctagagaatgtaaaccggttgcaaacggaatccggattgcacaaccgacttgaatccggataatccggattgagtcggattataaaagtatgcatttctacaatgtactccttaaacttaatgtataaacggtatacaagacactggatatcaaatctcagggggtagaataacgacgccaattggatgaaagaggaaagattatgtccaattagagtgctagtatgcgtcggtgatttctaatagttttggtcaaaagcatttagattcgatatcaaagtttgcgccgttctctgacgaaacagtcgaagccgagcctgcggagggaacgtcgagaatggatgtgactggcgctgccaagacgacggcgaaaacggagagcaccctccgcatcgctactgtacacatctagctgtgactgtcactcgtcatttgcgtgcacgtgcgccagcagaagcagaagcagaagcgcggcgggcgaggccgcccaggccatcgtcgacgatctcaagaagctcaagttgggcttgagatgactacggtgctgcagacctccgccgaggacggtctcaggaagagcaacaacaaggcgctggacaacctgttgctgcgcaagatgatcgtggtgccaagctccgagatctgcggcggcgtgagcggttctatgtctttggctcgccgtccttgcgcgctcaagagcaacctgctgtagatgacgctgctgtgcaatttcaagagcggcaaccacaagaagtcggcggtgctcagcatccagacggcggtcatggactcagacactctggaccgactgctggcgggcatgtcactgctcgagatcctggtaaacgacaactacagcacgttccaggaagacgtggcgcgagatgtcaagccgtacaaggtgcgtgaacattgcaatgggtgtgggaagagaaggagacttacggatattgtgcgtggtaaatgaatgggatgcaggtgaacctgatctaccccgcgacggagcagcatctgcgcaagcacacggaccgtgctagtggagaccaaggaggtgtaatgggcctaccttggctcactactacggcttacacgtatgcgcacgtgtatgaggaagcgtaggtttcttttacttgagttaagtatactcgagatccacgagtatacttaaataagataaagactccaagtagcgtgttttggtaaaagatgagaactgctatttgtgttttatgtttctgacttcctctaaatgtaatattctaaactaggaatctgccaacggctggagggcagaattccaatgctatgcatgtcactcattggctaaaagatgctgctctcaaccaataggaatcctaagtctctatggaccacccgtcctggtgatcctaaatgtatgtagcctttggtgtgtctacaccaaggacgagaaagtctttcgaacctctaccagacgtcgtgtctgttagagttacaagtgactgtagccacttgtgcgtgtaaccccgttacaccatccccccatcaaggttagacgtgccggtcccggcacgtcaactaccattgaccgcttggccaatgcgtgacgttgaagagagcgcgctcgtaatggaacgagcgcgtcgaagttgaagaccgctggcgcagcagcggataacctctctcctactgagtagcatgcgcggcaacgtgcgaagcgcgtcgctgccgcgggggcaggtatctatgtctgccctcgaagtgtcttcgggtgctgctgttaacagcagcgctcgcattacgttccagtgtgcagcgcatggtggacttcgtacgccctcaccatgtccgggacgtcttcgagcaagacgttctgcggctcccatgtatcttggttgggagggaatcctctccaacggatacgaaaacgaactagttgcctgttcgttctcgggatactgtgatcaacaatccgctcagcaatccatcgagttgagccgtgtgcatcacgaatcggcggcggcggtggcggaaacacaccccgtgtgtggtcaacttggtgttgaccctgatctcgtgtctccccacgaccaagtcccggtcgtggagtagttccagagcgctgcgttcggcgctctgaagtattcgcagtttgcggcggcctcccagactgcctcgatcgttccgaccgagctggaccattagctcgacccgctgctccagcgcgaagtcgcactggagaggacgatggcttccgccgagtcttctgctacggttcatccgagctaggtagctcgtgctgcaggtatggcttcagccttccgacgtagaacgttggatggagacgcatgctagacggaatgtctagcgtgtaagcattgccatgccgtgccaatactgtgaatggcccgatgacgcgcggagcgagcttgcttgccccgaagtcggaaactgcatgtttaggcaggtttcgcgtagctaacaaaaccaatgaacccttcttgaattcatttgtgttgcccctgccaacattgtctgcgttcagcttctgtcggtcgacagaagctgcaatagcgtcctggacaaaccgaatgacggcttgtctgcgcggtacgaagtgaattgcgtccgagctgaactcgttcagctcgcttccagcagtaggccctgcctctgcgttggtcttcgtggtgtctgtgccctgcacagacacgctcttcttgttcttgttcttgtcagtgtctgtgccccgcacagacacgttcttcttcttcttgttggtgtctgtgccccgcacagacacgttcttcgtgcgcttgtcggtgtctgtgccctgtacagacgcgcggttcttggctttacttcgtgtcgttgcggctgctgcggtgcagtcggagatcctcccccacttaaggaaggagccaccatcccgagtagactcgggaggcgtgggtgtctcatggcattcacgtagaagggtgtatgcccggtcgaggcatgcaccgagttgttgatggcgaactccgccatcggcagacactcgctccagtgttggaacgagtgagcgtacctcttaagcacgtctacgagcacgcggttcacgcgctcggtctgcccgtccgtctgcggatggtccgcagtcgacatcgaaagtcgactcccaagaagtgtaaacacttattgccaaaggtgcgcagtgaagcgcgggtctcgatccgacacaatgtcgattgacatgccatggtgtttgaacaccatgtcaacgaacagacgagccgtctgtttcgcagtcacttcagcgggtaccgcagcaagatgtaccatcttgctgaagcggtcaacaaagaccacaacgcccgtgttcccctgcctgtccggggaaataccgaacacgaagtccaaagacatggactgccaacactccgacgcagtcggcagtgactgcaagggagcttgcgcgaaaggcgcaggcttcacacgttgacaaacctcgcaagcacggacgtacttgcgcacccatttatactggtgggtccagtagaagtcccgcgtgagaagaaggtatgtcttctcacggcccggatgccccgcagttggtgcatcgtgatactcatacatgatcctgagccgcaggtcatggtcattgggcacgacaacgcggtccgcgttgtcgtcgactgcacggtagagaataacccatcgtgcacccgataacggtgtgcacgagcacgaagatgcttcggcagcttctgacgagatttgtcagaaggtgctgagccataggccagcaagagcttcgcgtccgcgtcgtgcgcgtacgcgaccttcacgtcgtccaacagtgacgacgttggggtgctcgatcacatggcgtcaatggcattgacgtcggcatcagtcgtggcgtagtcaggtcgacgcctgagcgcgtcggccaccacattgagtcttccgggtttgtactcaacccggaagttatactctgcgaagaatgagagccatctcgccatcagtagcgaaatgtgcggcgacttcacagccatccgcagcgacgcgtggtccgtatagaccacgaacggtttgcttccgagtagatacactcggaacttcgcgagtgcgtacttcatggcaaggagctccttgtcatgtaccgggtagttgcgctcagctggcttcagctgacgcgattggtagtagacgacacgatcacggccctcgtgatcgtgctgcatcaacgcacatccgattgcgaagtcggatgcgtcacacacaacgtggaatgggcgatcttggtcggcatccgccaagatcggcgcctcagtcaagccccgcttgactgcatcgaaagcctgctgacactcagcagtccaaatccactcggcgtccttcttcaggagctgtgacagcgggtgtatcatgcccgcgtagtcctttacgtacttgcacaagtacgtggccaagccaaggaactgccgcagttccttgacgttcgacggcgtcagccactcattgatcactctgacatcctcagggtcagggcggacaccgttcttcccaacgagacacccgagcacgggtatctcgctcgccccgaagatgcacttcttcaggttcgcgtagagcttctgcttgcgctcatgcgcaagcagcttccggagatgcaccttgtgcatctcaacatcgctcattccgtctgcagcccggctgtggacgaacacatcgtcgaagtagctcggtgcgaagtcgcgcaccgagcgcaacaagtgcgtcacgcacctgttgaaggtcgcaggggcgttcttcagaccctgcggcatctctagccactcccagagcatgctcacgcatgaggatctgatagaacccatcgcgcagatcaagagcactgtagatagtgctcctggtcatcgaatcgatgataacatcttttcgaggtatcggtgtctgcgccggtatcgccgcatcgttcagcttgttgtacgcatgaatgatgcgccaaccgccctgtggcttcttgacacagaacgtcggagcactgtgcggggatttcgattcccgcacttgtccagctttgcgacgactttcgaagaagtcgtcgatcgctttgacctgctctcgcggcagtggccactgccgcgtgacacagtacttcgtgcccggcacgagatcaatctcgtgctggattcccttgtcctgcggaagctccgcaggaatctcttccggaagtacgtccacgtactcccgtaagatctcgtagtagggactcattttcaacgagtcccagctctgctcttcaaagcgctccttcttcgtcttcgcactgagagtgtcctcgctctcagtggtggtctccatgaagaactgcatcagtttcttcattctcgctcttcgttctctcggcgtccgagagaatgcatatttgctcgatgcgtccatcgtgcaagtcacgcgcgaagcgcttccagctcatgactggaagcgaagtcaactccgacgcttgcgtcggagggttagcgagagtcatctccctgtaccggaacccggaacaggtacgcgtcaagacgttcaacgtctcgacgtccggcctgtcagcctccgtctgcccggcagacattccttgtagcgtctcggccccaggccgagacttgcgcagcgacgttcgcatgcgccgtcttcttgttttgcggagcccggctccgcttggttcttgacctcgtccaggcccagccgtggacgggtgttcttctttagtaccgccggcgggttcatcccgcgggcgagcgacttcaagcccggcttggtcgcccggcgcttcgtcgtgcagcccggctgcacgacagcatgcaagttttcccggtgcgggacgtttgcaaccgtccgcaccgcctgcagcgtcggctcccggagccgacacgccatcttcacctcgacgcctgttattggcggagccctccattacggagggtgcgtcggctccccgagccgacgaatcaaattcgtccaagctatcgactcccggagtcgatgcgacttcaatacctcgacgccaaccattggcggagaccccattacggagggtgcgtcggctccccgagccgacgaatcaaattcacccaagccatcgactcccggagtcgacggcgttacgtcaccttggctcttattattggccaaaattgatccaatcagattcgcgtcagcctccacggctgaggcgtgcgactcgtctgcgtcatccgtgccccctgaggtcggagactcttcctgattcgctgaaaagcgggtgtcgatctccgagatcaacacattttctccttcagccgtcggcggcgacgccgacgcttgctgctcttgcgcgcgtgctcgcgcgcgcccagggcgctccgggacagcggcattagacgctgtctcgagtggggagtcgcacgcaccgacaggtgcgtgcgtagcggcaacagggccatcgctcactgttccgctgtcgcgaccgaagcgcacgagagtgcgcttctcccaatcgatgaccggatcatgccgtgcaagccacggcatgcccaatacaatgtcaaacttatcgtccagatccaggacgataaaggtctcgacaaactcttgatcttcatacgtgaagcgcacgcgtaccatgcgcttctcggtcttcacgacggcacccgttggcagtcgtacttccaacatcatcgaagacaagccttgatagacttcgcagtcgaacaaagttcttcgacgcgccagaatctaccaaagcacggagagagccgcttgctctcatcgagttcacattcaggatgacaaggtcaggcttgtcatcttggttcttgtagtggggatgaacctcactgggggctgcagtcctcagtgtcgcgtgtccaaggtcgacacgcggagctgcattaccagtagggcgccccgcgcctactgggttccagcgttttttgtttgtccgcgacgatgcccggcatcgccgcgtcgaccaccatctcggtgcacgggtgccgtgcactctcgggcatagtgaccgatccttccgcaacggaagcatcgtacgttacttccttgttgctgttgataaccaacagccgttgcattcgagaggtccattggttccggacctcccgctatcgcgaccggaggcggttgcagcctcggcgcattcgcatgtactttagcctgcctcagactaaactcctcctgtatcgcaagagtaatcgcagcttcgagagtacctgggtactcacggaagagataggtctttacaggcccatctctcagacccttcatggacgtgacgaccttggtcgcctcgtctatcgggttggtcacaatgttcgagaccaagtaccgtgctctctgcgcgtaagcatggacatcatgcttaccctgctgtaggtcgaggaactctgccctcgaccaaaactcattttgcgggggctcaaacgcttgtctgaattcctccttgaaaccctcatacgtgctgaagcacgtaggatcagagagtcggcgtccatacgcccaacttctcgcttgtccgccaagacatgacatggcgaacgcaaccttggacaacgggtcgacgatacgtcgagccgcgatggcagtgtcgagttcgacaagccaacggaggagaggctcgccctctcttccgacatagttgctcacgtttagcttcaacgtttgctcgcgcggtgtcgtccccgacgccaccgtgatagaggaagcagcatcacgctgctccttcatgatgaatcccagagcaacaccgtgttgctccgtcggcgatagtgtgcgcagcattacagctacagccgcttctccaatgactgttgacagtcgttggagtgcctcccactctggatccgacaggtggaggcagttagcgcgtgcaacatgagttgcaggcgaagtggagctttccatgggcacctccgccctcataaaaaggttctcggctcctcgttcgtacagctccgtacgaacgttcaggtagtcggtcgttggacggactacaaagtgctaccaggtgtaatgggcctaccttggctcactactacggcttacacgtatgcgcacgtgtatgaggaagcgtaggtttcttttacttgagttaagtatactcgagatccacgagtatacttaaataagataaagactccaagtagcgtgttttggtaaaagatgagaactgctatttgtgttttatgtttctgacttcctctaaatgtaatattctaaactaggaatctgccaacggctggagggcagaattccaatgctatgcatgtcactcattggctaaaagatgctgctctcaaccaataggaatcctaagtctctatggaccacccgtcctggtgatcctaaatgtatgtagcctttggtgtgtctacaccaaggacaagaaagtctttcgaacctctaacagacgtcgtgtctgttagagttaagtgactgtagcaacttgtggtgtaaccccgttacaggaggcgtacaggttctggcgccgccaattcgtgtccgccgacaagctgctggagattgagtgcacgaacatcatgcccgaggtggtgctcaagcgtcgggtcaagttgactgcttcacggacctcatggtcaagtgctccaagtcgggcgcgctgagaagctgctctaggacgatatctgggcaagtacccagacccgagccaggaggaacgcaagaagtacgagatgcaggccaccatggccgagtcatactcgcccgaggcaatccacgagatctttcagcagtatgacatcaaggcgcatgcatggacgcggactggagcttccccatctcgttcaacctcatgttcaagtgcaccaacggctcccagaggggacatactcgctacctgtgtcccgagacgacccagggcatcttcctcatcttccgctgtctgctcgagtataatatcagcaaggtgcccttcggctgcgcacagatctacagtgccttccgtagccgaagactcgatccggcctcctgcatgtgcgcgagtcccagcatgcctgttgtcaacgaggagccgccaccacggcgatgaggagcacgtacgcgcgctgcgcccgcaagatcagcagcgtcaagaagatggacctgactgccatgcgcggtgagacgaccgagctcaacgcaccaataaacaggtgtgcaaaggttgctgcggacacggacacgcagtacaaggcgagccagggccgcatggtcgccggtgatatgatgttcaccacaccgtggagctgagccttgctgagcacgtgctcaccattcgcagcgtgtacatgcgtctgacgccaggagctgcgcatgcgcatccagagcgtagtactgccagatgcttttgttggtgtttgacgccacagaggtggagtcggagagtctgcgtctgcgtcggcgtctggcccggtggctactgctactgtgaacatgtcgagctgatcttctgttcatgctggcactgctgctgtgagcggtgcttctgctgctggtggggcaattcgcgctggcgcgtcggtggagaggaggcgagtattatgtcgagcgctgcagtaagaccggcaccaacagcaagacgaagagcgcattcagtctgtttctactgtgacggcgacaatgagcgaaaaggtgatcgctgcgccgacacctgggtgatgaacagtctgtacgcagctacggcccaagatgagctgcgtcaaggcgatgacgttttctcctgatatcgatgcgcatcgctgctgctagagagactttggagcagcgcttcttggcggtggagcaatcacagccagcacacacagagccggatgatgtgggtaacgaacacgggcgactacggcgctttggtgaatatgctcccaagctcgctgaagcagagcccaagatcccacacatagcgatgttagatcagggcgcggcggggcagcgtctgtccacgctaacacgctgctggagaagacgtaggatagcgaccatgggcaaaaggcaggccaacaggtgcagcaggaggacgaggacccggtgatgatcatcgcgtcggacgacgaaatgtccagtgtcgaggacagctcggactcggaggacgagcaggaaggcgcggggctcaagggcgccgtgcggagctgccagtagcagaaggaggcgcaacagcagccgaaggagaacgagatcgccgaggactttaagttcgacgacggcggcgccttccacacgtcaggcggcagctcgtgggacttcacggccaccatctcgcgcatcgagaagatggcgaccgccacccccgcggccaccaggcgcacgcccatccaggccaagatcgagaagcgccgcaaggagaaggagaccgaaaaaccggccacgagaacagtgactccgaggaagaagaagagaaggaggaggtgacggcgacagcgagagtgaggacgagatggaggaggagtcggagtcctctgatgacgagaaggaggagcaggatgtagaagaggacgacgttgtcgtggaggaggtgaagcgtctccaatcgctgctgaaggacagcaagaaggatcagcagtcgagtgaagagctggtggacgcgttggagaagaaggctgccaagttcttcgggatggaccctttcgctgccgaggagttcggcaagaccaagttcaagcctttcgccgacttgaagctgtctcgccccattatgcaaaccatctagcaccttgtcttcgagaaaccgacgccgattccgatccccatcgcgctcacggacaaggacatctgtgcccagacgggtagtggtaagaccgctaccttcttgctgcccattctggagcgtctgcagttgcgttcgcgtcgtgtgcagtccacgcgtgtcgtgattatttgtcccgtgcgtgagctggcgacacagtgtcagtcgatgtttgagcagctggcgtggcttaatgaagatctcacgaaggtgtgctttagcgtgtgggttagtgaacatgtgacctcaaaacagtacgaacaactatataaacacacattatattgtgaatgagcttactcatgagcacaagtcgctgcctcatccgtgatcgaaaacgcttggtcactcagacggcgattaaagttaaagaatgacttcagctcgcagattgccctcaccgtatcatcacccaagcgagcacggcgggcgttgagagctatgcctgctgctgaaaatgcaacctcacttggaaccgacgttgccgtgaccgccaaaaaatcttgagccatttgcttaatacgaggatagacgtcccccgtaacttgaaaccacgcgcacacttgcttgctttctttcatctcactcatgccttcatcagctgctagccacctgtcaagctctttcgcgaacgacgaatcctcacgttgcatttcccgaccgcctaaaaccccgctagtttcaaactggctgtcgcctatatcgtccacagggtgccatcggatatactttcaccattctgcttggaaaaacgcgccatgaggcccttcagctcgctacctcgcttcttttttgctgacggcggaccggaggctagttgctgttgggccagaaatgcttcgcggtaattcttgttgaactcatcttcaatttcctccttgacttgattgacaccttccaccaagaggtgcagataccgctgagcacgaggatcaagggctagagctatccgggcttctcttgtatttaccttcaccgtgtactcatccatcttggacttaacagctccagcaaatttcagtgtctgctcgtcttgttcggttgctatagtttccgttgcgtgaaactggatcaaagagtacgcgtagagcaggatcccgaacgtaggatacgtcgatgcagatagcatatcagtggcttctttgatggggctgagaaactggtaaagagcgtccacagccgcccacgcctccactgaaatctccttggccagcgaatcacttggtcgaatactgaaatccgtatactcacggaccttaccacgaattcggcgaagcaactcgttcaggggctgctttagcgttagaaggctctccatcatagtccacgtactattccatcgtgtcggcacatcaagcttaggggttataaagttttcgtccaggtcactccacaccccttgaagcgcttccgagagcttagttgactccgaaatctttttcacgatgtcacgcaaatggccaattgcagaatcgacaaatggacactcctcgagaccttcctttactgccaactgcagaacatgcgcggtgcatcgtagctgaacaacagttcttgaagtcgagctggtggtttgcccgcgtggcgacccagagtcggtcaattctgctagagccgttcgcgaaagcctttcaatatcgcgctgcaaccgttcgttgatctcagctaccatggttgtgttgttggtggcgttgtcggcagtgatcgtccaaatacagcgtagaagtgaggcatccatgtctttcactgcgcgaatgaagtggtcggcgagccgtttaccagtgtgcggatacatcacgcgtgtaaacgcaataatgacagacctcatcacccagttgctgtcaataaagtgcattgtaactaccatgtagcctctctttgacggggaagtccacatgtcggtcgtgaagctgacacggcgtccagtaacttcgcgacaaatctctacgcgagcaacatccttctccactttccattggccgaggacttttttgcggatagtctgttggcacggaacactgttctccggacgcaactccttgcaaaactccacgaactcctcttggtcaacaaccgcaaacgagtgtgaattcataacaatccatttaatcagcttatcgtcgcagctttttacagcgtctggggtcatcaccgcggcggctatgcggatgctgcctcgagcattcgatggtagtgcgctggaattgccgtagacctcaggatgatagttaacgaggtgtttcggaagttaccagtgctacgactgctccagatctgctcgtcagccgtacacagcatgcatttgtagatacctgtattgagctcatcaacgtactcgaacacatcagaagcgttcttgcgcttgcgtttgtgacccacggagctagcaacaacgacgaaagagatggacgggccgatagaagaaaccgtagaaacgctgtcggtgtcgtccatgctaggcagcgatccttcggttcgtagtgatgggacttgtgtgcggcagtgcaccgccggacttgacttgtgacctgaagggcgtgggttggtgccacgtactccgtggccttggaagcaaaatggagaatgaacgtgaggtagaagtaccgtggtttcatccggttacctccttgaggttggcggctcccgcgtagtggtcaaggcttgaccgtcaagcccatcccgagtcgggattcccgactgcggtttgccctctactggccgatatgctcgtatcacgtcaatcaggtacaacaaaatacacagagtaacattgaagcacgattggtcaatttctgtccaatgaactcccacgccaaacggattcgatccgaagttgatccgttttaaatccggttgccgcggaccggattcaagtctattcaaaacggattggctcatccgtttacattcgggaaaacgtcaaaaggtgtatgaatttgaaacgttttgtcaaaagcggttaactcgtgtcattaggttgtcggtatgacagtatgtgtatgtggttccaagcgcactaaggtgcatgataaagctgcatcagcaacgaatgcggtgactggtgtgtgggcttagatccaaatccataaaatccggggttaggaaggcaactagcccggttcgtggtgtccatgactttgatagcgaattgtacggccgagggactacaatgaacgtcgttatccattgtagccaggtcagtgttgccacagttctacaatacctacactctcccccggttgggggctctcactagagctccttcacctccgaaattcagatgcaaaatctacctagtatagccatgctatatacgcttgcggtttgcgttggtagttccttgtagctgcaatagcgaaattgtcgagtacagttgctctatatgctattattagttgaccgtgttcgctacgagcgtgttgttaataaactactgtgcttggaagctcgatcctgggtctgtatgacccgacctcggccgatataccgcggcaaccaaaacgtgtgtcagtacgtgtatgatgcgacgtgacgcccacgaccactacacctattgacaaacgttttcccaacgcatacaccttttgacgttttcccgtttacattctctactcgttgctaaagatgcggataaatgccttcgcgctttgcctttgcaggcttcgataggcctggtacgctgttgcattgtccgcccctgcaatgaagccagtgtgcacctggcaatctgctcaatccgcctggcaagtggcggccataagtacctcacagatgcattacagtttgagtgtgcagctccctaagcgtcggggctcgagtgtagtgtcttccagtacatgtacctaagcactaccgcgaagagcaacgaggaagcccccaaaaatcgcggtgtccgcggtgttagtgaatcactaatagtgatcgttgaaggcattaccgcggctcaactcaatacaaccacacgattacagtacaggttttatgcgcgtttttcgcgaacgtctgggatcgccaggcaggatggggtccgccctatttcgacagtcaaaccgcaagttcggcgacaattggccactctagctcacaattctgtacgaaatcctatcttccgatgtgcagcgaggttacggtgctgccccagcctgaggctgagcctccgctgttgtcatttgtgctcactttggaaaacactttaccgggacgaaggaaggcatgaatctccgtcgattagccgcctccgtcttcgtgggcgtattgggccttgcgtccaccacccctcgcgtccaagtgcaggctcaggaatgcacagcaaaagacaacactttcggattcctcgtggataagctaccgaccgcctacggactcaacacttgcgtggccaacaatgtcggaacgattgctctagcggttgctagcactatcttcagtagctgcggaatgttggacgtctacgatgtggtcaagaacgatgacctgaagaacctcttcacactgttcaaggacatcgctgcgaagcctgccgacatttcccctatcgtctataactacatggccaacgccaacgacgactcggtggacaacctgtgtgacgccttcagcgacgccctcggaccgtgtggtcaaaaggtgctcccgaaactcatccccgccttccagaaggacaacgtgtgctgcggccagatcagcaacctcatcgacctgctcaacatcgtcgtgccgcccgacaaaaaccaaatgttctttatcctcaacgagctcatcgacggcttcaacaggttcctgtgctctaagaagggcgatgactcttgcggcctggatatgttccagcagttgacgaagatgtacacggtcgagacgttcgacttctttgatgacctggtgttcccgttcatgactatcggtcagggcgaggagtgctcgggcctttcgggcaacccgtacaagaacaccgcgtcgcagtcgcccgggaagaccatcaacttcggctgctgtgtccaccagatgcggccgctcattcagaccattcagagtgctgtcaagaacgtggtgagtgacgaaacttgggacatcctgagtggaatggtggcgttcaagaacccgaagggaggcttcgttgacactctcacaggaaccaagacttgcgagtttgacggtgattcttgcgaagacccgaagggtatcactgacgacgttgagatgacgcgggagcctggttcgaagaaccccggcaagaacgacctcattgacacggattgcaccttggaggacaagtgcagcggagacaagtcggtgtgcagcgaagtgtgcaagagaggctctgtcgccgtccccgagtggctcaagtctactctggcgtatcagcgcaacttggccaacagcggtccgttctgctacgcgcagatcccagcctcccacaacagtgctatcactctcgcggacggcttcggcaaccgcgaccagctcttcaacaagaacctcaacccggacaagtggtattcgtacctcaagaccaacaaccaggtgctgagtatgacggaccagctcgacattggtatccgcttcctcgaggttgacacccacttcttcctgaatgaccttcacactggacactgcggtaaccttggctcggacgctgttgcgggattcttcggtgcgattggtaagacgcttggcaactacggcacgtacaactggggtccggagctgttgggctgcttcccttcgatctctggaattaaggcctcggaacaaccactgacaaaggactcgctggatgagattatggcctggctcaacgccaaccccaccgagttcgtggtcgtctacttggacaccggttcggatattaagcggacggacaagttcggcgctatcgacacactattcaccgacacattcggagacctgctcgtcccgctgacggcgttggatgatctggccaagggcaagtggacgggcggcagcatcaacgagttcatcaacgctggccaccaagtcttggctctcaccaacaccaagacgaaggttgcctacagcctgtacgatatgtgcacgaaagaaaagaagctcacggttgaatttattgatgatctgcctgacgctaagcgccagatcaacgggatcacgatctacagcgagacgaactggatccgctcatggtcggagcagctgcgctacatctcgctcgcagccacgggcgctcttaccaacaagttcccggtgttcttggacgcagagagtatccccaattacctgcggtggaacctgaacctcatcgctctcgacaacgccgacgtcgccaagatggcggctcaggtctggtcgtgggcggagaacgagcccagcaccaccgcggctggcgcgtacgtgcttatggacaaggacggccggtgggtagctagcacaaaggccaagaagggcacccgcgcgtgttgggacaaagccaaactggcgtggtccatcgtaaacttcgctaaggactgtcccgctggaacgacctttacggctccgacggacccgtaccagaactacctgctgcacgaggcgctcgtcgcccggaagatcgtgggcacgtcgctagttatcaacgccaccttgaccgcggtaggcgcgcccacccccgtgccgtcggaggttgcggtcattacggatgatggccctgcacctgctcctgctgctaatagtactgccggcagcgctgccacggcaagtactgctgcaagtgctgcagagaccatagaggatacgaaacccgatacttcgttgtgtagatcgccaggagcttgcggtccgaggtagagctgacattttctcctatgtagttgggtccattaaacttgacgttagcgttcaacttgaccagcttctgctcacacatcgcaggaagtttgcacgtcacagatttgtactggaatcccctccttttagtctttggtcgcatcttctggtgatcaaatccgcccttttggctcaccagcaaaacgagcccatttttagaacggtctaaatctagaacggagacttgcaaaaatggttgttaccgacacttttgatgtggccccgccactgcctgctactgccctggatcttggtaggtagttccgagctttttctggggaaaccgatgacaacagcgcctctggttgagcgcggaaaaatagatttttagtgccgaacaaacatattcaaatcagccctgatcgcaaggcatacaaaacagaagtagcgccggggtgtggggtgtcaacataaatgctacacaatggggctcggaacacaaacacagtaatatctagaatttgaatgctctaaaaagtgggcctaatctgccggtgagccgcccttatagtctttagtctcagttcccacttgtccagcatggagcgcgtgccgacactgccgttgccgctcttctcgagcgtcgtgggcttcgccgtgcccgacttctcggaggaaatcgtctcggacaagcgcagcttcttcttcgcctcgaaccacctcaagaacttggcgctcgtgtccaaatcgtggcacaattccgtgcgcgaattggtcgcccagtgccagcggtcgacgctgacgctcaagttccacactgcgagtcgccccgagctgctggagatgaggacgaaagtgctggcgagaggccgacacgtcacagatctgaggatctccatgggccaggtcggctccttcggggagtatttcagtctcggacggcgtctaccggagactttggacactctggagctcgggtgggacgcgctgatcgcacggatgccagggctgcgtcggctggacttgtccgagatgccgctgtgtagtccacacactgtgaaagtcgtggaggcggcgaccaagtcctgtcgggagctggaagctttgattctgcctggaaaagagcactatgaaatgcacccgggcgctgagattgaccctcttttggacgcggtgtacaaaggactggagagttggagaccggcgggacatcgacgaggactgaggcagttgaaggttccaacgattaatgagaagacgcggttccagtcgtgcaggaagttcttcgacaagctggtgacgctctgtccgcaggtggagtatctggatgggtacaaacagtcgttgtgtgagatggacagacttacgtgtcaggacgtctggctgctgaatttggaggactggaggaagttcaacgcggcgtgtacgagtattcgagagtttaactgggtcgtcgctccgtttgcagacccgtactttgaagtctttggggagtacgtgaagcctcaacttacgaagctcattttctgcattaacatgctctgggactgggaaaagtacttcgttgagctggatagggaagcgggattgctggctagatccaatatcgtcgatgttggtcgtgcgggctatggatggttcgcgagaaatcctagtagtgcactattgggctgtccaggcttgcaggagcttgaaatcgcgctctacggcccaccggatgaggacgaactcgatgatccgtttacttataacagagaccaaggttactttccagacgatgaagttctagagaagagcattttcggcgacgagttttgggagacgctggctaccaactgtccactgattaatcgcatcgcattgtgggaagtcgtggaggggcttgagctccatcacatccattcttttacggaccgcggactgatagcactggcgcaactgaaatacttggattttatggagctgcgccccataaactgcactggaagcgggcttttcgagttcttgaatggcttctccgatgagtttactggacaacgcacgtttcaaatttgtgtgggaagtaaatccattatgccggagcacgagaggacagatttgaatttctatgacgcagtcatgagtttgctgacgcgactcgccgatacgcatgcaagtgacctgcggatgtcacaacagagaatagtacttcgcttgaagaatgccatcgccagttcggtggagagggactggggtgtcgattacctcgaacggctgaaaaaggttgtggatcgcgtcaaggaaacccacctctcgcttcgactgcgcattacggcacacggctacaatggtgtaagcttcagaagtatcagtgagttgggtctctacgctgcgcacgctgagcccagcgtttggttcggctgggacgagcaagagagcaatcgcgatgtagtcttcgtgaaccgcggcggtgtgccatacattgatgaaagctctgaagccgcagctggcgatgatgacgaaggcgattccggcagcgactatgacatggagcgcgacaacgatgaggactttgcgctgtgatgtgatgagtaagtagtgcctcgcattgctcgatagtgatgctgcccagatagcgttaacgttacagatttgtaacaagaagataaatttctagcaagttgaagtgcgttttcaccgttcacgcttatttagtcgttgttcgcaatggtcgcaggaccttgaaacatcacaaagacggctgatttggacagatctcgttgagccaaaaccaatcatggtctctgaaatattgaatattgacgccactagaacattttgaaatttcagcgtttcttctcaaaaatcgtccaccacatttagccagggtccgactaaatagcgtgaacggtgtacacaaaatcacttgccaaaatccatacaaaacggaaagaaatttagtgcaaaagatcttggtgttggagaaaaatggagcgtctcccggcgccgctcttgtcgtccattctggcagtcgcagtgcccggatacactgaagacttggtcccttacaagcgcaagcttcccggcgagctcctgaaagccctcgcgctggtgtgcaaggcctggctggctgtcatcaaggatatcgtatcgcgcttccaggcatccacgctgactttgcactttcagacgggctccgagtcggaattgcaggaaattcagcgccaagcgtccgacaagggttcacaagtggtagacctgcgtatttgcatcggcaaactcgttccgcgcccaggattctaccgaaattccgatgccatatctctatgcaagagggacgccccgcccctcgacggtgtagatctcagttgggattcgcttttccaaagctttaccaatctaaagcgactggatctaactctaatgactttggagagtccccacgtgaaagggattgtggaggcagcaggaaagcattgtctacatctggaagctctggttcttccgagtcgtttccgagcgattagccaatttgttcctccggacccaatcgatttggttgactcgacactatgccgtttataaggctgcagaagattggtggcgtgctggcgaccaaaggggactacgacagctcacgattccaacgctgaattatgataactgtttcgcctcgtgtgccgagttcatcagaaatgtggtgaagtattgccctaccgtggagtatttggatggatacgtgcactcggttcgtgatacagacgttctaacttgtcgaacgttctggccgcttacggtgaacttgtggggggatttttgcgctacgtgtacgaatctacgtgagtttaactgggtgattgctccatttggagacccgttctttgaaatattcggggcaactgtcaagccccacttaaagaagttgacgttcggcatcaatatgttttgggactgggaatactactttcgctgctgtgacgaagcctcgggggtggagagaaatgccgcagcttcttcaacgagaccaggttacggtgttaacgctactcgagttgccagcgctctggagggatgcccagcgctggaggagctccgtgtgaacttgtatcacccggtggatcccgagcacagaggttttataatcgctgcaaacaacgatcagaggctgtttcctctcgatgaggttgtgaatatggacgcattcgatgaccgcttgtgtgaaacgctggccacgtattgcccattggtgtcgtgcgtcgagattaaagaggttgcgcctggtctcaatcgttcactgtcccctatccagacattcacggatgctggtctagagtacctggcgaaactcaaattcctgaaaactctgcacttgcgcccgatcagctgcaccgctaaaggattgctcaagttcctaaacaatttgtccgacgagtttgctgggcagcggacgtttgagcttgctgtggctggaaacaccagagcgttgtcaatggacttttacgtgttccttcaggagctgttacgcctgctaggcgatgcaaccccccatgagctggcgtgcgcgcagcagaaattcgtgcttcgagtaattaactcaggcgaggctgtgatgcaatccgtttggggtgaaagttacctcagctctttgaagagcatcatcgagaaagtcacgagagtacacgagtcattgaggctacgggttgtgagcgcgagggagcgtggaactacagaattcgcgactattcttgagtttgggatttacacactgtctggcgagcctagtccatcgtatggctggtgtaggagcgaaagcaacaaaatattcgtcgtcaagacctatgattacacttcagactagtgccgaagcgtcaatgcggaaagaagacgttcatttatcttcgggtgctgacattaaagctgatgatgctgtcactgcatgagctcacaaacaaggtagccgttggaacaggaacaatacggcatcgccttcttgactcttatcggtgggaatgcagaagctagtgtagctctgacgagtaaagaggcgggcgggcatttcgcatcgatacggcgactaaagggaaagagcgaaaattgtaggccctacaaaactacgcagtcaattcgattttttgtttgttttttgcttactggtactgtgatcgaagtgggccctgtcgtcccttcactagtgtagtgtgcattgtgttgtacctttccacctggaaaactgcgtcgtcatcagttctaccttcaactttgctttacgagttttgaggtgtgctagaaccaacaacaacaacacacgaagcttaaggccaaacaccacctttttttagagaatcaatgctactagtaaacccacctgagggccgactacaggcgcatcgtcgtgcttcttgtcagcttgtttttcgcgtgggacaccagggtaaaatctctgaggattttgtaggctggctcgtgcgttgatgtcatggtgggcgctgtccagatattaaacagcttcgcgacgtgcctctcatcccaacctttctcgatccaaacttgatatcgatacttctgcattctctcagcgaggttcttgaggtctgggatgtctttcagcgcgttcacaattttggcccaccttgtcctccggcaaactcttgatcagcaccgagcacagttgataattgggaaaccaattgattcccttggtcgctcggtagtactttgcgaaccaaaccagccgacaacataggtcgacgtgtctggcttctttgcgatccgatcaaaatggtaaaacttagccagcttctcggggtcataacccagtttgagccatatcttcgttgacaacttctcgtccattttcgtgagcttccaccttccgtcgtccagcgttgcaagttttgacacgcccgatagatctccgcgctcttcgtcatgatccctcgccttaacttccccaattgcggcttcatgcgatcggagaaatcgttgcatggttcccacacgaccaatatgcagtaggcgttcagccaaaacttctggggctggctacatcttgcagacactacagttgctgaccccaacgagaagctgcacgagccagtgcaaccagtccctgaacaaccactgctttccgaaacacagcgttgcccagcactacgccattctccgtgaacccgacaagagctctacaatttcaagagaacacgtcggaaacaaacatgcaaatgactggtgcgttggtggtggtggtcaccatcacgtgtatctttctggcgcaagctcacgcatcagcctgcgagtcaaaacaaaaaagaccacaacgttatgacagactggatgtctgcatcggtcatcagcttttcgtgctgaatgctcttgttatcttgtcttagtatttacaggaaccgttgatttccgaatcagttcacgttgaacgcccccccccccccccccgtactgttactatgcacaaaaaatgattcttgaacggattttacaggacattaccaggacacacaaaattgtagtattttgtccaatcagaattaaattaacatagcatcgcagttttgcctgtgtttggcctcaccgcaacagcaaacatgccataggctgccccacctgcacaatagtataactttacctcttcatcatcaagaaaagctggccgagactgggccggcgtaggcggttgtaatttattgccaagtcggcgttgaagcacgctaatacggccagctcttcttcgacaaggacatcgtcagcgatatggcgctcaacaaaagtctaattctatgctcaccacccacgccgatgactccgttctactcgtatcaggaaacaaagtggccgagggcttcgagtacaggtgattcggtctcgggtggcatgctggcctggatctcgacgggcaggagatgacgcgcgcagaccagcaaccatcaagactgagggctcgctacggtagcgtcgtgggcgacttcgttgaggacgatcacgatcacgacaactagctggtacggcagctctggtatgggcgttcggcggaggctcaaacgtgggcggcttcagcgggtcagaccctaagggaaggtgctgcaattgctcttcgctatccagggacactacacatacaacagtcatggcaagcgtcgacacagcgtgtgcccccgcaattaaatgttgcgattagcactgggtaatggagagctattgtttgtacatctttcagcgttcatatacgtactggttcgactcggcgttactgctgacttagttaaaaaaaaaagtgttgagaatgtatgaaatgtatggctgagcttagatttctttaactggtacgactaaaatgctccttggtctacaaagcgagccatgaatactgtatcttcctggtgggcacgctacgctaacggacaccacgtgtgtgttatattctgcttggcgcattagctcggaagtttgctgcattgcgggtgcggcatccgcaatgcagcaaatcttgcaggacatgttgtccttgaaaagcacaaaagattgactttgccaagcttgtgccaataatactagattttgtgtaggatttgacgccgggatgtttcgatttggaaaatacaggacattctatgctcgtgagccagatcgatgtcctgcaaaatctggagaatgtgagttagcatcaatacaaaaattgacctggactaaatcacattccaatatggaggcgctaccagcgcttccgttgccgctgctgcaaagtatcttggcgttcgccgtgccgggctacgtcgacgacctccctgtcgatcgacgtaatggcatcacgttcgtcctcaaggaactcaagcacgtgtcgatggcgtggggatcagaccgtaataaaaattacaattcagcaaggagaaataaaaaaaatggcgcaatataaatatactgctcttcaatttgaggcatttctccagaagaaataaaccactttctgtgcgtcatatgattacggagtcgtttagaaacactttttggggtgttgctttagaaaactttgcatggtggatgcttaaagaacctaccggtagtaatacgtgagcgagatatatctggatcttgctatatatcgttaatctggtgtagtggattccagggtttcaccttggtatcaccgcagttaagggctcgatagcatgtcgcggcggtgacccacgccagccacaggtaatgggttcaccgcatcatgaccagtcaagcttcacacagacacacttcatagtgtgtgcacctgatatgaggttacagactaagcattttacataaagctcaagtccctagtggattgccatccgctgccgtcccttgatgtgatgtgttcggcgggattcaccacatctggacgtcattgatgttctgacttgcgtacatattggtttctaaagatgttgattgcccattgtagacctaactatcattttatgagtactttgctatgtttggcgcccgtgaaaccttttttcatattaattgtcaataattggtacaatactgtatcgtattggaatcgttgatctccaataataaaaattagtattgcaaaacccaattatttattggatcgcaattattatttcggacctctggtgcaaagatccttggccagtcgatggtgaccgtctccacgacgtccctgagcccagggttcacagtaaagtaacccgagaagcgctcaaacgtgcccatgaccacatgaagttctgtgatttggtcccccttacccgctgctttcgtgtacagttgaaacaatcggcgggaacccgggttcccgctaatgataccaaatcgcgaattatttatttaatttttggcctccatattggggcaagttaaaccctcatacctaagtgctgtcgatgaaggactaccctcaaaatatgccaccggcactgaatagacccaaataacataccttaccatgtccaagtttatctttcatgaacaggaggatagcgatgagaccgggaagcactgtaccgctgcaccaggcaagcgtctggattttcgtggagacacacaggacgagggcgaaggtgaattaaccttccgttccccctactgagctttagctgcgttctatgtaggtcatagaccaacacttcaatacatttgctcatacatgtgtactggtagttttgagggaaccggggtcccgatgggtacccgggttcccgccaatattttcagttgctgcagctcttggtccgacgccgtctcaaatttgagcattagtgtcgagtctcgatactggtggactatttcgcgcatgggcgctctcgtactcaattcaatatagtactgtattttcggacctctgctttgcacctctgaagaagctcaagactctgaacctcagggcaatacaactggaaagctgccatgttcttggcgcaatcgataccgcagctacatgttgcctcaatttggacaagtcggtgctgcccttcaagcgagatatgtacaatgtacaatgacaccattcaagctgtgatgctgaagttgtacaacgcgttgaagaagtggaacgagcaaggaaaccgtggagggttgaggcatctgaccgttccgacgaggaacatcaaggacaaagtccgggctagcaaggagtttttcgagaatgtgacgaaatcctgccctctgatagaacatatcgacgggtacaaggtgtccttgtcgactttggatagtttgtggtgcaagatggcttgacttctgacggttgaagactgggaaaagttcaacgccgggtgtcagaacttgcgcaagtttaactggatcgttgctcctttcggggatccgtactttcgagtctttggtgagcatgtcaagccgcaggtgaagacgctcacgcttggggtgaacatgtattggaagtggccgtggtacttccatgacaaaagcagcgctgctgggccgctccctaatattgactggggagaggaggactactgtgagcgccctggctacgggtttcttgcaactgaccctggagctacattgaaaggctgccccaagctggatgaactgattatccagctgtaccatgcagtggatcttgacatgtacattcccccggacatgggcgacatccaggattttcccgagcaggaaatggtgaaccaaaacgtttttgatgaccacttttgtgtgactttggcctcgcagtgtccgttcgtaactcactttgtgattaaggaaataggcaactatttcaataggaaagagttgaagccaattgtgacattcacggatcgagggctgatggcgctgaccaagctaaaatttcgtcgctctttggagcttcgcagcatcaactgtacgggacgcgtcttgctcaagtttctgaattctcagtcgaacaagtttactggagcccggacgtttgagatcactgtcggtgggagtccagtcgattcgagactcgcattctacgacattctaaaggagctgcttgtccatcttgctgagacctcggacccgccgtgcgcccgccagaagtttgcgctacgacttctacgacggcgaaggtgcaagtgacgagggcgagagtgattttagtaacgagaccgacagcgactttgagatgtaggcgcagccacgtcattatgtatagataaatggaattcgtcgtgcaaagtgaacgaaacaaaaactagaaatatttctatgctatttcgatacagtttctatcggcaagagccagactcttgcactcttgcgcgcttacttaaactcggcaagtaacgatggaagctctcgatgctcgcgttgagcaagtgctgggaagtatcacctctgacaataccaagtacgtctatctacgaactttatctcgcttcatagactggctctacgagaatacggaggcggatcgacggcaagtcctgtttactagtacgtttcgtgagctgggtgcaattaatgggtagagtatcgcgcagtggttctctatcgtccctttacgaagccctgccaatctaagtgtattaagtactatggagtgtatgcgctacttgacctcgatggagcagcgtggtgtcaccggaaagtcgacttttggaaatgttcgctcggcgatagtgtaccttcacactcagacagaaagtcctcggtgaatgctactgcaacgatgcacaccgagcttaacacatggggtgggggctttcatcgagtgccaagagagtttgtgctacccccaagaaccgttcgcgttgtgtggcagcaatggtgtgctgggcaaccgccactacagcagctatcaaagcacgatatggcttcaagactacaaaagatccggcttgcagagcttcagcggctgatgcgcttcgttgaagcacttctgacgagtgatgaggtcctgcgagcgcacagctctctcgattcggctggccttctttttgagcaagtaaagaatcgtttaccgttctcatcgacgtcgagtaaaggaagagcgcgtagacttgaccaactatcgtggagaacactcgcccgtgagcaggcaaggcacagctccagctagactagctaccattacgtaggtaagtagcggtaagcttatacaatacacatttacttcgaagtagtggtgtttctattttcacactgtgtaccaaatgtgcggcacaatatgcttcgtgcaaactgcacgatgaattccactacatcttgaattatggacattttcatttgatttttgtacagctggcatttttgcattcgtggaattcgccggtcaatttgcaccccgaattctatacgaagtggcagattcgcacggcgatttccgtagaaatagccattacgagatggctacatgcaaatctaagatttttttacaacattttgggtttggcctaataagagactgtacccaagatggagcgtctccctccgccgctcgtttcgtccatcgtggcctttgccgtccatgactacagcgaagacctggtcccgaataagcggaagctgcctgtggacaacctcaagcaactcgcgttggtgtgcaagtcctggaacaacctcgtccaagacgtcgtggctcgcttccagtcgaccagactcagtctcagttttaagtcaggctctcgctccgagtcgatggaaatacgtcgacgtatttcacaaagaggaccaaaagtggtggacctatacgtccaaattggtgacgccccgcctcgcggcggtggagttcacttcttacgcactggaatggtgaggtcctggacccataaagacttcaagatcaattgggacgtgctgtttgccgggctcccagctctgcagagactggatctgtccggagtccaattactcagtggtcacgtggagctgatcctgcagagcgctgcaaaatactgcaaaaatatcgagtccgtggtattgtgcgatgtggacgaaatgctgcagggacgagtgaacttcgactcaatttttggtgcactatttgctgccatggaggtttggtactcgagcgggaccaatcgaggattgagacaactcaaggtcccgtcactgaacgaacgagagcggttccagtcttgcaagcagttgttcgacaacttggtgaagttttgtcccggagtggagtacgtcgatgggtacaaggcgacgctgtgcgagctggacaagttgacgtgtcgcgtcgtctggctgatcacggtggagcagtgggaggagttcaacgccaagtgcacgcagctgcgggagttccattgggtcgtggctccttttgccgacccgttcttcaaggtgtttggccagcacgtgaagccacgcctgacgaagctcacgtttggtgtgaatatgctgtgggagtgggaggaatactttgattgcttggctgaagctgctggggagcctcttgacgaagatttttcacggcgcccagagcgaccagggtacggatttaaggcgacggacccgagcagcgccttgaagggctgcccggcgctggaagatttggagattgcactgtaccatcctgttgacggggacgagatgggctacgacgacttcgacgaggccgaggccgacgagtttccgattgatgaggtgctgaacattgacatattcggcgatcaattctgcgagacgctggcgaagcattgtcctctgctgaccagcttctccatctgggaagtcgccgaggggaagaatggcaatcttacgccaattcgaacgtttacggaccgaggccttgtagctctggcacagctgaagtatctgacgaggatggagctgcgcacgataaactgctccggcaatggtgtctttgagttcctcaagaacctttcagacgagttgacgggacttcggacgttccaaatctgtgtcggaggccatcccagtgactcgcgcttagcgttttacaacgtgctgtcggagttgctgatgcagctggaagcatggacgccagaggagctttcgtggggacgtcgaaagtttgtacttcgcctgatgaactcgagcctccaatcggtggactcagcgtggagccagcagtaccttcgcgggctggaacctttggtcaagaatgtgaaaaagttgcatccgaacctgcgctttcgcatcacaacttccgggcgccgtggacaaactttcagaagcatcatcgagctgggggtctacacatccaacgcggagcctagcgtgtggtatggctgggacgacgaggagagcaaccgcgacatcacctttgtgaatcgaggaggcgggacgtcgagttttggcgaagggcggggcagactgccggtcgagttgaggcaccctgagctgcttgatccggactcgctaccaatcgactacgagctgccagcgggctacttcgatgactacggaggctacggagggtacggcgactatgaggactattacgacgaggacgacgatggcttctacgatgccaatgctgatgaactgtgggaataagtcgttgacgctgtgctgacgcaccttcaaaatgcggtgataatcaacttcttctaccaagcggcatcttgcacaagaccatcgagccaggtaggtaaaaaacactttcattttcacaagtgcatttcgttgtactcgcttgtagcgctgatagtacgctgcatcgtgtcggtccttatgagatggtttcattgatcacgacagaagtggtggtgatgcccttggtcgagatggccgtcatgagcaggtagttctggtatggatcggccggcgcagagtaagtgtatccgcttgcacaggaatccgcgtacgcgataaccgaccacgccaagctggagctgctccagcatgccttgtacgtctttgtggctgaggtgcttgccacccaccgaccactggtgtttataagcacgtaggctccagaagctgtggtgctcggctcgttctccgcccacgaccacgcctgcgcactcatcttcgcgccgtcaaccatgtccgtggccacgaggttcatgttccagcgcacgaagttgccaatattgctcgagttcaagaacgtctcgaagtcttccgtcagaacgccttcatctgacagcgagatgtagcgcagttccgcctggtacgagcgcaggaagtaatcgtttccgtaaatctccagcccgtcgatctcacgcgatctgcccggcaaagtgtcaatgtagtcggtcgacagaacctcatggccgccgcagaagtcgtacaagctgtatgcagtgtcatcattcgcaaggagaagaactcgatatccagcctccaggaactcgttgacgctgcctccagtccaggaatccgacgccagcgacttgagaacagactgagggacgatcaagtcgccgaagacgtcagtgagcagcgtattcagttcgtcgtacttgtccagccgcgaaatgtccgagcccgtgtccatgtagaccaccacgaactccgtcgggttctcgtccaaccagtccttcacttcctgcatcgaactgcgagtggtaacctcgtcggttgtcttgatacccgacacggaggggaagcagcccagaagctcggggccccagaggatcgtgccgtactttgacaactgcgagtcgaacgcgtcgaagaatgtcgtgacggagctcgacccgaggttcccgcagtggcccgtgtggaagtcgtccacgaagtagtgcgtgtcgatctcgatccaacgcatgccgatgcccagttggtctgtcaagctcagcacctggttgttggtcttgaggtacgagtacgacttgtccgcgttcaggttggcgttgaagaactggtcgcggttgccgtagccgtcggctaacgtaatggcgctgttgtgcgtcgaggggagctgcgcgtagcacaacttgccactgaaggccaggttgcgctggtacgcgagggtctggttgagccacgacgagacggacgccgtccccttctcgcagacgctgctgcagactgtccctgctgaattgcacttgtccaccatggtacacgtgatgtcttcaatgtcgttcttgccagggttgttggtgccgggtgtacgcgttgcagtctgctaggtatgaggtacgatggatccgagcacgtgtccgtgaaggtgcaggacgtagttccaggcaccgcgtcgacgaacttgcccccactagcggagaagtcgatcatgccgttgagaatgtcgactgtggtgtcgtcgaagaagtactcgaagccgctttggatcgactcgatcagtggacgcatgtggtcgatgcagcacgagtagtcgatggttgtagcggacgtcagcgaggctgaatccgtgtaggactcccccttcatggcggcgcactcttcacctgacgagatggtcacgaacggcatcaccacggactcaagcagtgtgaattgggaggaagtgtacgtcgacgtcatctgagagaacatgttgtagccgcacgtggtgtcgccgatactggagcagaagaactggttgacgccgttggcgagttcgttgaggatgaacgagttggtggtcacgttcggcggcacgaagaagtcgaccaggtcgatcaagtcgctcacttcggagcagcacgtcaagtctttctggaggaccggcagcagcgtcggcagcagactcaggagacatggcgagatgactgtgttgagtgtcgagcagaagtcgtccatgtcggacgaggaggtgtccgccatgtacgagtacacgaggctcgacatgctgctaggggacgccacgatgctctcaacgagcgagacgaggttcaggatctgggtgttcgactccaaggcgagcagatccgtgagcgtgcaggtgctggacgaggctgcgagtgacagcagaaccgagtagaggttgttgctcacacagacgtcgaggttgtaggttgacggcaggatcgagagcgctgatgcagtgcacgtcgcggcttgagttgtcagctgagaacccgaagctgccaggctcacgacgcccaatgcgagtgacgcagtgagtcgaccgagcttcataatgcgtcgaaggatactcgagctgttcgagttggaaggggttgtgtccgagtagaaggcaagtgaagcagacctggtgaattgcgaactgaccgatctctccagtcgctcatgaccaggatgccattgcattacattgcatactgggcagcagacgcgaggtgaagagattgacaagaatcgtcaatgagtcagagtgacgctgtggttccacctcttggccgatcggataccacgatggatccgatcgctctgatctcggagtgggaagtaactaccaggcgtagctacggactgcaacatgtgcacagcagcactgtgttacaagcgatcatttcggtgtcaaagctctccggtggtaatttattgtacgggtcgcactcagttgcggtgaatgcttattgttttctcgttgtctacgtgttcgccttagcattcacttacttgcgcggtgtcgaaatgacgctgtaggcgctctcgcacgcagcaagtgctgcggcttcgttcttgtatcgaccgagatacagcggcttctggccgtgcagatgcagcttggccgagtacgtggacttgcgctgacgagtgacgacgaaccgctggctgtcttcccctgcgctggtgctttcaccgctgctgcggccttgagagtagtcgctgcctcgcccagagctgtcggattgcatcgaagaggaagtagccccctctctgaaagaccccgtcgatgtagtagccccctgcgaagctcgactctcgtggtatgagctcggtatgtcgctgccacgcccggagctctgcgcgtccccatcaacacgcactggtcgagcttcgtcgtcgacgggcgaaatggtctgcagttgtctggatcgacccgcgcggttcttcctccactgatgcttctgacccagaacagtgtacttctgaccggcttgagccccgttacacgcttcctgctcctggttcgagctgcccccgaagagctgccccattccgagtcggcccagcatgccgacgtcgcctgagaggctggcgctcttgcgttgaagctggtactcggagtcctcggggacgtcgtggatcttcagcgccaccgctgcaccttgctcgatcccattgttcgagttgcgacgcagagagccgaagccgttgccctcctcgcctctggacaagtctccgtcgtcgaagacctccatatcgtccacaacgggggaaacaatcgcctggctcttcgtcttggggtagttgctgcctccgtacagaccccgcagcgccgtcctgtgcatgttatgcgggccaagtgcgccggtgttacacaactgggcgtgcttttagactgtgctttcaaccctcgatacctcaaggcaggtttctctccccctcttgaagcactatctttagtgggcacaaccacgtgggatgaagcgatacactagagtttcaacgttttcgatgtattatttgacaaggccggaacttgccttcgttccgactgctctcatagaataatgaatgaacgcactgctggactcgacattgttacgcaggcagagacctcgtggacgactcggttgaatccgtcgagaagctgctattgctcgagccccaccgcgaccagcgcgagaagcgagactgcttgcggctggcggttttgcaggcgacacagaccccgaccgtcgtattcctcgctccaggcacgtcgacctcctcaacgtgatgacaggcgtggcaaatggcgtctccacacaccacgcagttgtatcgcctggtgtccagcagcttcacggcgccgaagtgtttgctgcagcactcgcagatttgcaccgcgcgcttgtcggtccactcggactgcggcacgaacgttgacgggtcgagctgtcgacgtcgcaggtgcgagacgacccgcttgagcacggcaccgaagcgcggcatgacgtagcgcgtggccagtctcggagcgaagccacccgcttcaatgcctacaatgtacgcgaccttcgtctgcgcgttgggttctcctgaattctgcacgaagtatcccgaccggaacatgcgactgcggatgaagccctgcgggacgtcgaactccgagacctcgggcaagttgagcgagtcccagacgcagtagcccacggtcgagccatccggacactggataacatccgtcgccaccactacacacatgtctcgatggttgcgcagcagcgccggcgtcttgaacgccgtgtaacgcacgtaagaggagcgcagcgggtggtcctccgacggatgctccagcacgctcaagacgcgcgcgtccataatgttgtcgtacatgatgcggcaccgctgcagcagcatgtccgtgtcggacacgacgaacaggttgacgacgtcctcgaccgaggcgtccgtcgctccgacgcagcagaagcgcgactgccccttggtcacgctctctttgtcctcgaagtacatgatgtcgtccttgcgcatcttgccgcgccaatgggcgtcctcggtgccctcgtgcagcatgctgtccagcacgttttccaccgcgctggagatctgctgggacagcaagtccttcacttcggtcgaaagctctaagtattcaggcttgccctccgaaagcggcaccccctcgccgttgtagctcgacattgaggacgacgccgacttcagacgccgagcaaccggagctgaggcggagcgcttagtgactcgggaatttgccatggtcttcctccccttccgctttagtcgatggcctgtccaatctgtcaatgaacgtgcacaagggtgaggaatcgattcggcctgcgcttggtgagactgtgtcaatcgagtgttgtcgtctgcgggtcgggcgagccggaccaaaaggtccgctagccacgagaactgcaggttgcacatgctacgcatctttcgccagcatcccccggtcctgtagccacgccgagcgttttgatgctcgggatgagcgtgcaactccgtagaagctgaagcgacagcaggcgcgtcgcaggaagagaagaaaggagggggcattgccggtgggaacgtgggtgcattcgctgacctggggatggcaaccttggtatcgttgatatccatcccgaaactcactctcacacctggtcggatcacgtgaatccaagctaacgttttgttttgcttgaagatgagcgatatacacattaaacttgcaggttcgggactcctttatgcggatgacaaaggaataagctgcgcctttcacggtgcaggcatcacgccgtcggtgaggactgcaacttcgtcctgtccacgatcgcgatacggatctgctagcgaaaaactgcgcctgttttcgaggaggagcatcgaaaagcgatttgcgcttcctcaacttcatctcgcgaagaaatgttttgtttcgtgagccctggcagcgaaggtgagggcgacggcgctcgcacgagttttctgaacgccaccgcccggctctcgatgtcgactgcgttgaacttgcagggggcggaatgcacacgcaaatattttctcgctctttttcaaggctcaagagatgaggccacagtatctcggtgcgcgttctcccccttgtttcctactacttagtacgtcgggccagttcggtgcgacccgcacacgcaagttgcgatagctcagcgtaggtggcgttggtttcccgaaggttacatgtatcatgagtttcgtggatttccaagacttgaatctattgtacatgcagatcccaggatatggatcgctatgccgctcatgtcctcgattgacactcgggatggaggagaccgacgacgccacggtttgatttcgcgaacattcgacaacctcacgcacacgtgtgcaggcgttggacagcgtgggttaactttgcgtgggcagcgttggcgtccctctcgatgcgttgcttgtcgtgtccgatcatcggactccgatgaagtcgacaaattggaacacgagcaacctgagcccagatgtatctctagaatgcctcgagcacttcgtttccattggcggtcgttgcttagtgttcgcgcacgaaaacgcgttggaaacacgcgctcgcttcgactgcagctgcagacactctcgatgcagatggcattcagtcactgcccacgttgagccgcctgagtcgaagaattcttcccataaatttcatttggcacgctggtgacgcaaaaacaatagacaggaatgttgatgatctggtacagtatactcccgcacagaaattagagttgagtaagtgagtcaacgaatatatttacaagtggagatccttggcttgtggaatttctaacacgacctagaattgttttagtcttttaaataatgggcctcatggagagcagttcaaggttggatgcgtttggtgcagccacagcactcgcgacctaagtgttgtcactacattgtcgtatcacggagttttgtatgctcaacttcggcaagcgagatcgcaatttttcatgaaccgcaaatttttttagcttacttctagtacttcgcacgtgtattttagttttgccgacccgaatgctgtagttcccaacgacaccagcaaactcggctacgagtgcatttaatactgccgtgacagtgtcccagtgacattgccacgcccaaaactttcatagaatatggctcgccagccaacgttcacaccggcaaagacctcgtcgacgattccgttgaatccgtcgaaaaactggtcccccaactcgaccaacgcgatagacgcgaagacttcgtacgactcgcagtcttacacccaacgcagatccccaccgtcgtgttcctggccccaggtacctcaacttcctcaacatgatggcaggcgtggcaaatggcatcgccacacaccacgcagttgtatcgcctggtatccagcagcttcacagcaccgaagtgcttactgcagcattcacaggtctgcacggtccgcttgtcggtccactcggactgaggcacaaacgtcgacgggtcgagctgtcgacgacgaaggtgcgaaatgactcggctgagcactgccccgaacttgggcatgtaataccgagtcgtcagtctcggagcgagcccgcccgcctcaatgcccacaatgtacgcgaccttcgtctgcgcgtccagctcccctgaattctgcacgaagtatcccgaccggaacatgcgactgcggatgaagcctctgggcacgtcaaagtccgagatgtcgcacaaattgagcgagtcccagacgcagtagcccacggtcgagccgtccgggtaatgaatgacatccgtcgccaccactacacacatgtcgcggtggttgcgctgcagcgtccgcgccttaaacgccgtgtagcgcacgtaggacgagcgcatcggatgctcctccgacggatgctccaacacattaagaattctggcgtccataatgttgtcgtacatgatgcggcaccgctgcagcagcatgtccgtgtcggacacgacgaacaggttgatcacttcctcgaccgacgcgtccgtgacgtccacgcagcagaaccgcgtctgctccttggtcacgctctccctgtcttcgtagtagacaatgccatccttccgcatcttgccgcgccagtggttgtcctccgtgccctcgcgcatcatgctgtccaggacgtcgtccaccgccgccgagatctgcctcgaaagcacgttcttgacttgaggcgacagctgcagatactctggcgttcctcccactgatagcggcaccccctcgtcgttgtagctcgacatggagctctgcgccgtcaattggcgcgagagcgacgtcgaagcggagcgcttagcgactttggaactcggcatggaaggcgtgcgaaggtgtcagtcgaccggcaaatctgtcaatgagctacggacgcggtggagaccaacgagtgagagatccggacgctttacaacagggttgcagccgatgcgagatcgtgtcaatcgaaaattgagtcgcggtttgctcaagccggaccagaacgggcgctatgttgacggacggggcggatagccatcccaagcctccatgcgccacgaaaagcgcaggttgcatatgctacacatccttcgccagatcctccacgcgatgttcgctgtcaagggccaacgcacccgtggcatgcaagttgatcatttgttttggtacatgttatacatgtactgtagctctgctggcacagtagcaatgcactgaaagccatccacggagctttggtcaaatggactcgggaaagaagccggacgctacgtgttggcgatagaagtcggcatcgtcggcataacatgctaaatggcttggacttccttcataacggtaccgacgtccatgttctcgccctggaagtcgcgagcatacacttctcgaaggcctccacgatctcgaggatgtgttttacagatccggattttccaaaaagtgtgtttttttcggtacgatttgcttcaaagtcggcagctgagcgaacgaagaaccaggaaaacgtcctcctcgagactttggccattgatctcgttgatgatgacaaccgacaggcacatttctcaacgacgcgcgtaatgcccgacgtcttctctttgcgtagtgcccgttgaagtcctcgtgtgaactaatgctcccggatgttgcacaccaagagaaggtcttcaggatctcgctgcgcgaatttcttctccgtcactaaatcctgagcacgtccacggcccaaaaatcctgtacttaagtaagaaatacctgatcgcattggatactttttcgctgtcgaagtgactgtaccatgaaaacaatcaagacgttcgtgagcttacatccatgaactgctggagttcgcgagtgttcgacaagttgtcgacgacaaccgcacgcgtccgttggtgaactttggagttggggcggggcggggcggatgatgtctgcagaaccgatttcgaaacacgtgcaggtcgttcccagctggatccctagaaagcttgatatcgcttgtcgtgcagtgcattgcaccatcgacccaacatgaacagtgcaagtgtatggtggtcatcgtcgtcaccttgaaaggacgcaacgatccccagggttagtcgaatttgggaggacgcgacggatcatccgaggaggcgggggaagggaggcaaggcaacatgggggaagagaccggagctgcctcggcgcgtggtcgaccggattccagcacggccaagaaccgagatgccgccaagaagcgggcggctctgtggaagaagcagatcaagagcttcaagctcaaagacgtcggcaagaaggtggacgccgtgcgcttctgcgcccaagacgagcggttcttccgagaacaggcggaggtgctcccgctgctcgtggggttcctgtccagaacgaaagtacgcaaagtttgtatggttcgcatatccagggcttcgacttacagtgccctttaccaacttcacatagaccccggatctagtcgtggagacgctgagtgtgatgtacacactgctgtcaactccaactgcctctgagagcaacgagtctgacgctgaagccattcatccagagttgaacggtaagatatagctacgatttgggtcatacttctgtgcaagcttctgacgttgaatatttcgtatttcagctgcgtttatcctcaatcgcagtgtgagcgccgactcagcgtggaaagcaggagaaccgtttatcaacctcttcaacttggctacattgtctccagacattcgagtaaggatttcctggacaatgagtttgggcacgcaaggcactgagttgtttatttttctttacagatcaaagcaattgaagtgtacgaccttctccttcgagccagcattgcacactctgaaccagcagctgaagccaccacgacgttgcttcagtttcagtccgttggatctccttgctcggcgttgctcagttgtctgggagtcgataacggcgagttgcagttcgctgctttgttgtgtctccgctcgctaatgaaaacctctccgaacgaggagtttctagaaaaattcgagatggagacgggtgtttctcgcacattggagtttgtagttcattcggaacggcgattccaccgcccagcgctcgacattctggaacgattatctcatttcggtaagtcgtgagttggtttgttgtcttgatagttggatgctcactaacactgttgcgttgtcctttaatcaagagtgcgggcgagaatacttgaagaataatgatgcagcaaagtttctgcgtgatgcgatccgggaagctcaggaaacaattgtgaagacgtctacgattgttcctgtaagtggaatggattcgagtccgttatcgtctgaggacgctccgttattatgcgccaatatcgaaattatttgccaagtcttcgctcgattgactctcgcaaaggaacaagtggctgcaaacaactacgttgcaggagaccagactctgttcatggacttcatcgatgctggggtcgccatacttctctacgacatcaacagcgctctaaatcccgtaccagtcccaacggaatctccacggacgactggcggcgcggcagcggcggcagcagccaccgctaatgcagcagcagctaacgccgcagctttggcgtcattgctcccgttcagtatagaccgttgtatggccgtcatctccactgttggtcgtttggtggagcatagtgaactatgcaaggcgcacgcgaagtccaaggggattttaccggtgctactggactgcttcaaggtgaaaggggcggacaagcttcatcaagtcggggacaagcttcttcacttatgtgtgcacgtgggtgacgcacccgaattccttcaccgtcgtgcttcccaagagcatgacaacgatgccgctgaaaacgagagtgacaagcaacagcaagaggtggaaaggaagcgaattgatcccaacatcctctgtgcagtagctactggcgtggaggctgaaaatgagttaccagacgctccgtcgacgggagaaagacctcctctggtggcggttgatgctgtattgactctactggaagctagtcatgcaactgccaacgaaccgctggtctttcgccacctccgatggatcgcagctttagttgatttgccagggaatgccaacgccttgggcgagcgagccgtctccctctttcttcagattttggctgatactccgtcaagtgaagagctgcgcttcgcattcttggcgaagtgcatccgcgcgattgtactgcagaattccgctgctctggaggtacgttgctgtgcttagtggtttgttccatgctggtggtaccctctaacttttcagtgttgtttagctttgtggaagtgcgcacctcgatccgtccgcgcccttcttcagcttccttcgcaacgaatcggagccgatcgaagccggtcaaagtttctcggctgatgcaaactctacatttctatcgcagcctattgatgaagatccatccaaacctgaagaacttgacgccagcaaggatgagtcagagccagttagcgatagctgtcggctggagtggattgacgagtacgacgagcaagcagcttttgatccaaaccctctaactgaggcctgccacgatgtcgacgtttatctttcggtcgccgacgcgctgaccgcgttgactggtgcgtttctcaggtggaactcgaccagtaatgggccgaccacaaccgacttcagcgagctcatcgcttccaagctcgaatcggagcacgccgcatcgggaaaggccggaattgccacaacggctgggagtaagaagaagttggcaacagatccggttaaagcatcagcagtgggggaagcagtgatgctggcggtcttggagaagggcatgcaggtgcccaaactagtctcgaagtacgctgcagtgaacccctccgtgtgcgtgactttgctggagcttttgaacaatttaatgactgttcctggaggactcaaggtcctgctgaatctggcaaaagctgagctacagacgcacgcccaagccgagacagtaacaccgggtgaagccgttaatgagtggcctctgtcagctcaactatctgctcagtcagagcacgctcgcttgcttagcccagttctgggcgttcttcagtcccctgatacctcctttatcgagatcgaagctgccgttcggacgattgctgtgctgacgagtgacttggagactacggacaaggaaccacctacatcggcgcctgaccctgttgttgagactgcgaagagcccgactaaaggtgcagctgctgccgctccccctcctcctgccgctccgactgttccagaactcgtggtcagggagagcgaccgcttcatcaatgccgctctgggttgtggagcgctagtgctgctcctagccttcatggaccaagctcgactaccagtcggatcgggagattcacccgaccgagtgaggcgaatggagacgcaaattgaggaaatggtgatgaagttcatcactttggcgcagatgaagcaggaacacatcattaccaagtaccgggagaagctcgagcaagagcaaccaccaactaccgaatctccatcctcaacgcagccttcaaaggacccagagttgccttatcaagctcggtgggctcaattgctacttgatcacaagttcagcgttcctcgctttggctacgagtcatacagtgcgttacttctcgcttcagagctcgccctccccaagctcgtctcgacgctcctgaacgctggagcttcctcgaaaaccgcttcacctgagggggtgacgccgttgatgatcgcgttcctcgtcgggaacgaagagatggttatcgacctgctcgacgccagcgctgacgtgaacgccataaccaaagacggccacgatctgacggtatggaactgcacgctggcctctccggtgaaggcgcgcgtgagcagcatgatcacaaaagcgtacagcagctcggacgcgtcagatatggggataagcatgagctctaggattcagctggactcgatcgaggggtctctgcaattcctcgacatgtgtctagacgctggcgtggacgccaacgtatcgaacgccaacggagacttcctcctgcacgcgcttctctctaagtccatcgtacgtcgcaaactacgtggactggacttgtgcttccgctacaattcctactacgaagaccgcagacgcctgcaaagggccgtgactgagctggtcgaggcgcatggagccaatgtcaacagctgcaatcgactgggccaaactccgctccatttggcgctgttgtacggcttcacgggcatcgcgaagatcctcttgaagcgtggagcgaacccgaatgtccagggcgtctacgggcacttgccattgcactacgcgtgcctcggattctgcggtagtctcgacgggagcgacggtgaagctgttgagatagcgcgtctactgctggagcaagccacgaagtacccgtgcacacttggagtccactccgatcgacgcaagcacaagtctgcagctgagaaacaggcgctggcgattgaaaacatcctggaaagcggcttgcagagtgtcgttgagccccaagcgatcgtccagaagcttgccactgcccagcagatgctcacgacgccatcgtttgtaggggagtttctgccctggcactttgcgtgtggagcgcacgtgcagctctcgtcggtgttgtgccttgatgacgacatgcagaagtggtttgaagccaacggacaggctcgaactgggattgtaagctatttagtcagcgagtgggagatcgacatcagaaaatgcgctagtgagggggtgacagcgctgcacttggcagtgaagagcgacgtgaacgggaacaacctgccggtggtcgacttgctgctggaaaacgctggctccgggctcaatgtgaacgcagtccacgagcacattctcatcgacactttgcctgtgatcccgagtggagcgcacgtggtgtttgtcgacgaggatcaagatatgaagcaggcgttcgtgtcttcccggtccatagacagcaagtatcacatcattctcgcggatggacagcacgtcgacggcattgcacgcgatcgtctgcaggtcatcagcgatccgcaccagagaacgtcgcacaacttccaccaccactacaagtatctgctgccgatggagagcaggttcgcagctttacactacgcgctgcagtcgaaccaggacacgctggcactgcgattgctagcgctgccgaacatctccctcgaccctgaaggcagtgacctgccgcttcttgcgctcgcgtgtgctgctcgccagacgccggaggttgtgaggcggttgatcacccaacaggcgaacatgcgcgtgcatctcccactgcgaacgtccaagtgtgaattgacggtggtagatgcgggcacgtcgcgtaccatggccaagaggaagcacgccgcagcgctgcattacgctgtcatttatgacgacttggggatggtcgaggcgctggtgtcgagcccagaggggtatgtgcagccgaatgtccggcggtcgggagatggcttcacgccgctgcatttggcctgcgagatggagaatatgaatattatcaagctgctgctcggccgtgacgcgagtttaacgcagtcgtcgagtatgtcggcgcatggagtgtcacctctggagctgttgatgaagttcgacaccgtggagaacgagaggatcaaagaactcatcaatgagcactacttgaagccggaaatgctgctggaagggtcgattacggccctcaacccggcggtaggcgacaacaatgaagcgaatgctggaacggaaagccaagcgaacgaagtcgatgacagcgatgcaccgtcgtgcgccttgttgcgtgcggaagagcacaattttgacctcttcgagcgcgttcaaggcctggttggcgacaaaagcggctccctcgctcgacggctgcagagggaactcgataagagcgacgcagtgctcggattgttcttcgatctcctgaagcaaccggttgacgctactgaggctgaagcagagtcgcagcaacccccgacaccacttatggcgattttccagaagctgcgccatcctcacgaatgctatcggcagtatatgactcggtctcagtggaagccccccaagaactccaagatgtcccgcatcgtaagcaagacggcgcttgcaccagaagaggctccaaccgagcctacatcatcacaacagtattcgtagcagataggaggatagctactattggtaagcaccagtatggtttggattgcatctagcacgtttcgatcttgcctatacataggaaggagaacgcatcgacaatcaatctcttacccaaaggcgatgaaggttctcgtcgaggaagaacgcggtgaacatgctgatttcttgttaggcggaccgccagaggtgcctcagctggatctgactattcttcgtgaagcaaagcaactttccaaagctgacttggttcaagcccgacaatgctccttcgaagacagagcttcccatttgctgcctccagtgcacgccaacaccactcgagagcaacgagatgaagatagtaaagcgggatttcgtggaagtcaaacagctcgaattcgctttgctcctcctccacgatcaaagcccaaggctgctgcatatccttcccgccctaaccgaacccaaagctgcgaacttcctactgatctcagcgagaaacaactgaatacagctcgatgcttcaaggcattggagaattggcagcagtcgatggaagctggtgtcttgaaaaacctcctgggtgacgtccacgacgttctccacgcagcgatttatcaacagccagaagcaacattcgaagccacagcaacgaaggagctacctctgaataatgtccctgagcagcttgaatatttctcgttggtggcggatatgcaggagaaagtgaagttgcaacaacaagaacgcaagcggctgaggtcccaactcgccatggagcagtccctggagcaggatttatccacgcaactgcagcagctcgagcgggaactgacccaactgcacatgcgccacgcccacaaccgcgcagagattgaaggagagcgccgtgctgttcaaattctcgagagagactacgcgtcgctcaccgagcaggagcaggagttgcagcgcgactgcgaagtgttcgagcttcaactcgacacccagcgagcgcaactgaaggaaatccgcagccagcagctctacctggactttgtctcgagcgctccgcttaagcggcacatggaggagaagaagtggcaagagcaacacgccgctgtcgctctgcaggttcagaacgctgaggccgagaaccacgcgctcgaagctgcgaacaggaagctcgaagaagaggcggccaagctggagacgcagtacgcgctcgacatacagaccaagcagcagtccgagacggcgttggctgagatccgcgcgaactatgaacgactccaggacgcctttgagcgaacacgagtgtgctacactccgaggcctgactgggaccgcatcgtggacgaaacacccgagctgtccgtgcagaagtatcagtgggaaatgatcgacaccaacagctctaaagatttaaccgtctcagtcagcaacaacgcagatgacgatgaagaaggaggagtgctcgagcatagatcactcggtctggcgatagcagaggaagaagaacactcacacagcagaggacagacgaagacactcgtgagagagatgctgcactggatcgagcgtctgcaaaagcactgcggggtcaatctacacctaagccgggtaagttttatcgttctcttgtcattgaattactctaactaaggttttgtcttgtagatctggcatgacgttgaggaagcgcgtgtggagctcaacattctgcatcaccagttggatcgagcggttcggaagtcgtcgatgctttcgatcgctcttccgaacgcgtcgggtatcattaccatcgccgcagcgacgtctccaacggggtctccacccaagagaaggcaggactatatcatggctctgggtatgcacgaaggcatcccgatgttcctacgtcaccgtggaaagctaaagaggaggatcttaaagaaactggacgtggagaaggttgtgcgtaaggtctgggtcgagaagcgcaagcgcgagcagcgcaacccgctcggacggttccctcttgagcaagttctgtacgagaaactccaccgcaagtacggattccagccgttgatcgccgagtgggggtacaacctgctattggcgctgcaaatgttcagctgggactcggagatcgagatgttcctgctctgcctgactggcgcggtctccgacctcgtgtacgtggaccaagagcagatgattcaaggctgccagcacctactgctgcgactgtgtgagctttacaacgtcgagagcttcgtgacggagaagcgagtgctgctgaaagacgcgctggtagcgctgcggacgttcttccctctgaagacttcgggccaactgcaggcgatagagcaggcgatcatccgagatatgcacaagatgaagcgcgggggaaatgactccatcttgtacattgaagacatcctcccgctggacgtcaagtatccgctgggatttttcgtgaagacaattcggactcagcacttcaaggagatccaggattactacgcgctgcttttcaggtgtgtacacttttgccgcaggatttcggggtgaagtgtctctaacgtgtattcgacattttagtgagcttgaacagcgcgacaccgaacagagagggattctgccactttctgccgtgaaagatgtaggtattttgactgaggggaatggaggtaacgcagatagtgacaattttgtggcggtttgatgttgtcaggcgattctggtcattgatcctctggccgacccgactgcggtgcagaatctcattatgaaggctctgcacgtcaaggctcgtgctcatttgcacatgcgcgagcctgttcattacaaagccgtactgagggtaagtttgacaaatgctacatttttgcagcggggcagcgagctaacgaggacgtgtgtgaactctcagaaactaaactcgacgtgcttgatgaagttcgcgttgaactttgatcagaacgcggaggtcaattggcgacgtcgtcctggtgcaggctacattgactccgctacggatagcacgaagccgcacagaaaggcatcccagtaagaccaacacaagcaaaatgcttaacgatatttgcttgtggcgggttatgttgttttccacgcgttgcgtagagaaaaattccacttcgattagccccacatgatcgtgaagtccgaggcgatggtctggttgacatcctccagactaatttctaggcgccgcgttgcagaatcgtacttggaaatcgcgccaattgatactctggagggcgatgatagcactcccagaacaatcaccttgctcaccagactcacaccagcacttgtgtagtcattttgcagtactttcgacgtgaaggtaccggctgacgcagtgaacttggcaattgtggcgctcgggttgctgatagtctcgccatcgtccaagtacaagtctccgctcgcaattccgttcattggtagcgcgacgaggatatcgaagggtgtaagccgagcagacgcggtagtgagagctggctggtgcatcgccacgattaatccgcctctaatgtgcaccggcatgtcgaaaatggtaacgttgatcgtcaaatagacgccagacgtgcgaacctgcgagtagtcgaagatgttgtaccagatcccacgaggaaaataccctgtcacgcttgttgctcccttgtatataactggagtcacgagtagagcgctgcctagcatgaattggtggttgatattgtgcgtgacggtgtcggtcgggaactccatcagaagtggacgcgccattggcaggccctccgtatgagcatgatagccaagcgtgtagaaatacggtagaagctggtagcgcaagccgatgaacttccgcccgacagtcgtgacttcaggccacacgtatgtctcctgcgcagatgagtccagattgttgtggttacgggcgaacgggtagaacgatcccagagccgtccaccgcgcacacaactccatgtcagaattgcccaagaacccgcagatgtcagcgccgaccatggggatgccgaagagcccgaacttcagaagggcagggattgaccagcgcagatcgttccaagtagcggcgttgtcccccgtccagtgagccgcgtggacgccactaccaggaaaagttgatcgagagagcacgaaggacctcttgttggccagctcctcctgaacggcattggtcacgatggactcggtgatgccgtacaggttgtgcgcgtcgtactggcggatgttgccgtactgtaacgcactggtggagatccccttgttgtagatggcgtcgtggctgttgacgttgttgatcttgaacggcgggttgtcgtacttgttgccgtcacccgagcagctcaagcaacacgtcgtgatggcattgatgcttccagtgttcgggcaagttacgcccgactgacgcacgcaagtcgttccagggcagaagttcgcgagctcattcatgtcgatccagaggccatcgaaggcgaagtttttgtacatgagctggatctgctcaccccagtaagacttggcgttcgggtggaagaagtcggggaacaccgtcggcccaggccacacctggcccaggtacggcttaccgctcgtgtccttgatgaagatatccatcgacaggcccttcgtgtacgcgtagtcgttggtgtcgtccgggatgccggggtcgatgatcggcacgaacttctggccggcggcgtggatctcgtccatgaaggcggccatcttggcctgcgggaagttggtcgggtccagcgtgaagtcgtggtagctcctcatgtagtcgatgtcggaccagatgacgtccagcggcagcttgttgctcgcgtacttgctcacgaccgtgcgcagcgcgtcgacagagccgtagccccatcggcactggtggaagccgtacgaccagtacggcatgagcttcggccggccgatgagcttcgtgtactgcgagacgacgttggccggcgtggggcccaccacgatgttgaagtcgagcacgccgccgatcgtctggtacacgaggtggccgctgtccatggtcacgtccatgccgttgctgttgagcaggagcacgccgtgggcctggccggcgctgttgacgccgaggaagaacgggtgcgagccgtacgtgttgacgttggcggacgcggatccttggtcgcgggcccagagcgtttgcttgtcgcccgacgccatcttgaagttctcgcgcgtgctctcgccgatgccgtagacgctcaggtcgctgcccagcaccgtggacgcctgcaggtactggtccttgaccacgagcgagatgcccgacgagtcgaacaacgtgtagccgtccgacttgcgcgtcacctggaacgtgaaggggttctgcgtgtagttgaaggtgtacagcgggtccgctgcggcggccgtggcggtgctgtcggcccccagcgtgccggccgtgaagatgctcttgggcacctcccagcgcttgttgttcttgtccacgatcttgacgcgcacgctgtcgctctccgtcttggcgaccgtgaccacgagcgccgacaggtccgagccgtacgaggtggccgtggcggccgagttcacctgcaggttaatggtgagcacaccggccgactcgctggtggacgtgacagcgtacccgggcccattgacgtagccctggacggacggggccgacgtgggcgtctgcgtgttctggttcacgaacgcgtaggccttgtattggttgtaggacgccttccaggtgcccgtctgtagtggaatgcgtgagctattgctgctggacacttgagccttgacgcaggggctgtggaggctggtagcagccaccaaccaggtaccaagcgcgccatgaggcatagcgcgtcggaatgatgactacatgtagatcgcgagatttacttcgttaggtatccaactggtatacctatacaaaacattgtgttaagttaccgaaatgttatattgacaatttcagatttcatttgacataaatgtttgtagaaaatcactttaacttggtaaaaaaaaaaatgaaaagtaaatacacgagcatgcaaaagttctcaagacaggcaaaaaataacacctctcgctgttttgctactgttcattgactgtccatctatggttccgagcgttgccaggctttaggttgtttgttacatgaagtgaactataatagctggatcgggtctcacttcaagcttttgaaagctaaaggtacaggtagaataggcagaatagttgtcagacttacactgctcaaccctaatagttcgcttcgctagtccagcgtgtttggctgtgcaaaatgccgctatgatgacgagtagtggtccagaaatgcatgtctgaagcgaagtaaacttgcacgctaaacgccaacacgctccccagcttgcacgtggccacttgattcatttctcgcggcggcaacgctactgcccagctccgcttccccgtctgtagataccgtgaactgcgctggcgatgacgcttcactctcgttatcaaagcggcaacgatcgtgcatgcattgacaaggccgatcttccgtctgagctcaagttgaagtaaatccctgcgcgtctgcgccatgagccgagaccgagtctgattattactggatttattttgccggcccgtcgaacagcgggagggatcagcactgcgggagttgacaaaacaaactcgccgtctaataacgttgggatgctgtatctgccgggtagctagctagctcttcactacaacatcagctaagttcgtggcgcgcattccttttcagtttttttatcattccaatacaggcgtagtctgccaaaatcgactttcaacctttgcgtacccgatctgaagttcgttggctcatgtcacttgcctgccaggaacaattcctgcttacaacgctagccgcaatttgcaccgtgaacaaaggcggcgtccgctgttcgaatgcgtacgaccaatggaatccgctgtccggtccagccgtgggatgaccggcaaagctacctcgcaccgggacaacttcaacttggccaggcagcgtgggcctccaaagacacgtagcaacagcaatgtacatgtattgcgccaccccacccttgcatgcactacatgtacattggaggctacccgccctcttcgggccaaacccaattgcttggccatcaacggaagctggagcctagtactccaggaccgacgagctccaccagaacgatcgctcacttctcaatttgcttccttctcgacaaggcacggcagcaagacgatgacgttcaaggctcgactgcatcacgcagtggcgctcttcggctgcatcgcgctggtctccactctcgcttccttggctcatgcgcaaaccaccgtctccgctggaggctccggcgtgcacatcctgttccaaaccgacaagtgggtgacgccctacatccactacaaggccggcaccggcagctggaccacgtcgcccggcgtggccatggccgccagcaccaactccgcgtacccggcgaaggacggctggttccagttcgacgctgcctcggccacgtcgctcgagttcgtcttcaatgacggagtcggcatcgtctgggacaacaacaacaacgccaactacaaggtctcggcggccggctcctactcggtcgtgagcaaggtgtccggcttcaagacgggcgatctcgttcgcccgagtgatggcacgggctaccacatcctcttccagcccgtcacgtgggccaagccttacatccacttcaacgccggcagcggctggaccaccgtgtccgggtacgccatgacggccagcacgtacgccggcaagttctcggctgccaacggctggtaccagtacgatatctcgtccacgtcgtctgtggaaatcgccttcaatgacggcaacggagtatgggacagcaacctcaacgccaactacgtgcgctcatcgcctggcgcctacgcgttcgtgaaccagaacacgcagacgcccacgtcggccccgtccgtccagggctacgtcaatgggcccgggtacgctgtcacgtccaccagcgagtcggccggtgtgctcaccattaacctgcaggtgaactcggccgccacggccacctcgtacggctcggacctgtcggcgctcgtggtcacggtcgccaagacggagagcgacagcgtgcgcgtcaagatcgtggacaagaacaacaagcgctgggaggtgcccaagagcatcttcacggccggcacgctgggggccgacagcaccgccacggccgccgcagcggacccgctgtacaccttcaactacacgcagaaccccttcacgttccaggtgacgcgcaagtcggacggctacacgttgttcgactcgtcgggcatctcgctcgtggtcaaggaccagtacctgcaggcgtccacggtgctgggcagcgacctgagcgtctacggcatcggcgagagcacgcgcgagaacttcaagatggcgtcgggcgacaagcaaacgctctgggcccgcgaccaaggatccgcgtccgccaacgtcaacacgtacggctcgcacccgttcttcctcggcgtcaacagcgccggccaggcccacggcgtgctcctgctcaacagcaacggcatggacgtgaccatggacagcggccacctcgtgtaccagacgatcggcggcgtgctcgacttcaacatcgtggtgggccccacgccggccaacgtcgtctcgcagtacacgaagctcatcggccggccgaagctcatgccgtactggtcgtacggcttccaccagtgccgatggggctacggctctgtcgacgcgctgcgcacggtcgtgagcaagtacgcgagcaacaagctgccgctggacgtcatctggtccgacatcgactacatgaggagctaccacgacttcacgctggacccgaccaacttcccgcaggccaagatggccgccttcatggacgagatccacgccgccggccagaagttcgtgccgatcatcgaccccggcatcccggacgacaccaacgactacgcgtacacgaagggcctgtcgatggatatcttcatcaaggacacgagcggtaagccgtacctgggccaggtgtggcctgggccgacggtgttccccgacttcttccacccgaacgccaagtcttactggggtgagcagatccagctcatgtacaaaaacttcgccttcgatggcctctggatcgacatgaatgagctcgcgaacttctgccctggaacgacttgcgtgcgtcagtcgggcgtaacttgcccgaacactggaagcatcaatgccatcacgacgtgttgcttgagctgctcgggtgacggcaacaagtacgacaacccgccgttcaagatcaacaacgtcaacagccacgacgccatctacaacaaggggatctccaccagtgcgttacagtacggcaacatccgccagtacgacgcgcacaacctgtacggcatcaccgaatccatcgtgaccaattccgttcaggaggagctggccaacaagaggtccttcgtgctctctcggtcgacgttccccggcagcggtgtccacgtggctcactggaccggtgacaacgccgctacttggaacgacctgcggtggtcgatccccactatcctcaagttcggactcttcggcatccccatggttggtgccgacatctgcggattctctggtgcttccaacatggagctttgcgcgcgttggacggctctgggctcgttctacccgttctcgcgtaaccacaacaacctcgaagctccttcgcaggagacgtacgtgtggcctgaggtgactaccgtgggccagaagttcgttggcatgcgctaccgactcctgccgtacatctacacgctcggataccacgcgcacgctgaaggtctccccatcgctcgtccgctgctgatggagttcccgaccgacactgccacgtacagcatcaactaccagttcatgctgggcaacgcgttgctggtgacccccgtggtgaaccagggagcgtcgtccgcgaccggctactacccggccggtgtctggtacaacatcttcgactactccaagatcaccagcaccggtggatctgtgacgacggcggtgactctgtacgacatgccggtgcacattcgcggaggaaccatcttggccatgcaccagtcggctctcaccagcacggccgctcgcctcaccccgttcgacatcttggtcgctctaccggccagtggcagcgccagcggagacctgtacctggacgatggcgagaccgtcagcaacccgagcgccaccatcgtcaagttcaccgcctcggccggtacgttcacgtccacggtgtcgcagaacgactatgcgggtgctcgctcgagtctggtgaacaaggtgatcgttctcggtgtgacgtcggcgccctcgagcgtgtcggtcggctccatttccaagtacgactcggccacgcagcgcctggagatcagtctcgcgaatgtgaaccatagcatcgcctcgggcttcacgatcacgtggaagtaaacggaactcgtccgaatccgcaggtgcttcgggcagtatcagtcgttgcagctttggctccaaaatatcgctctttcgatgaggtttagctagctttcgaagtaaactaatgttaggttggacatgtcttatgaagtttgcaggcgtattcacgtgaacttgtattcacctcccaacccgtcccaggaatacaccaaaaagcacagcagaaccacttgggcattcatgggaacatcatcgaaatcgtcgaccagctcgtagattggccacagcttgattgcaagatcgggaggggttggcgtctggtccgtgttctgtagtagagcccccgcaaacaagtcgaccccaggaatcgtgacgaaatcatcgactccatgccacgggttggcaggaaacaactcgtcgggggatcggacgggaacaaaagctgcagacttcgtagtggttggcccacttccctcgccgaaactacagatcgagcggggcgctgccgaagctcaccgcgtcgccaatcaccaccgactgaccaggcgcttctcgaaggtagacgatggccacgcacgcaaacgttctgtcttcttggcggcgaaagaacttcaccaagagcacagcgcgtaattctgggagcatgtcgaagaatctgcggcaatggctctgagctgccggtaggcttcgctgtggaaattcaacctcaacaatcaatcgaggctgaatggggctgtctccagcagttgagtgtctcgggcgaagagcagtttccggtcgaatcataacacggaagtgacctcctgggagacctcctgggatctctaattccatggttcctcccccaacagctaagatgctgcccgtgtttctcgtgtaaacaagtatttggccagttacttctgcagcagcttgtgtatgggctattccttggactttagtgatgaaaacgtcaaccaaacttggatctgcttcagtgtaccgcgcttcgaaatacacaaacggaatgctgccgatattgctccgtcgccattgctccagaggcacacgctgcgccacgagcacttcgacgtcgtgttctccattcctagacgacgttcatactcacggatagcagaatcacgctggatgcccgtgacctggccagttagtggctcgtattctgtcgccatctccaggaggatttttcaaaagtacaggaagtcaacatttaggcacactccaatgatgcattttgactgttgtagagagatatctcctgatcaatcgcatgcagcccctgatgatctccgcaagcagactccacaagcggatcgaaaacaaccgtgagctggcacccatcgccgttcagagcgatgcaatgtaggtaggaggatggtgtttgtgtggccagtcggttgatgattttccagccaagcgtcatttctgactcaacacccggaggctgaagcaagattcgccacgaactcgcatcaaagctgccagagctcgtaaacggcagcatttcctccccctccatggcccaagtgaatgagctggtgtatctcgaagctgttgtgaaggaggcgatgcgcctaaatcctgccgttccgtccaatatccgagaagctcttgaagacgttgtgctgtgcgatgggactgtcgtaaaggccggcgaggctgtgagctggtcttcgtattccatgggacggatgcctcacgtgtggggtcccgatgcgaagcagtttaagccggagcggtggattgacgccacaaccggaaaacttatggctgtgtcgcccctcaagtttcccttgttcaacgcaggccctcgcgtgtgtctcggaacgaagctcgccatgatggagatcaaaatcaccaccgctagcgtactcagcaagtacaatctgaccgctgttccgggacaccaagtcacctacagactcagcttgtcactcgctatgaaagacggattcaaagtcaacgtcaggaaggccaccgcagcgtccttcgacggagttgcctgagctggacttacatttcttactcgctattgtcgttggggcttctgctagctttgtactcgattgtcgcttcagcttgaagatagtcgtagcaatctaaacttcggtgttgattcacgcttcagcttattccatgccggcacatagcgcacctcccacactgttgacgcgaggtaattctgcgtatatcgacttactcgaacgatgaacgctgggaagttgctagattcagccgacaacagctgcttcagcaaactcatgatagtttcgtgaaaatgtgattgtaattcaggcgtaccgtcgtggccaggtgggtcgttttcaagccacgagcagtgtcaagctcaacgaaaacgaaagatttggtacgaacagctctgagtctcgtaatggtcctccctacacattcagctcgtcggaagcctgctgctgcttgtagccacggcatctctcgtgttgctctaccatcaattgggggatgcggtctcgctttcgcatacgccctgaagttatctcgaaaccgtgagagccctgccacagctagagccaacgatgataagcaggaggccccgtcacgcctactacttgacctccaagtacatccaccttgaagtatgaccgtcggatggaattatcgatttcaaacacgtgagttttcgataggtacaaggatcgaggccagttagtgctgcgcgatttgaacttctccgtccgtcttgttcaaaggtaccctgcgcaattagctgggcccgcttggtcattttagcgacgctcaactatggacaggcctgtcaggtggaacttggaccgcgggagatggcaggctcgatgtgctcgtagaagacaacggcaagagctccagcgttggttgagtgacagatgctctgtatggtttgcccgttgctgcgcaagtcgcgtatcgtgattttcgacgaagttaccgacgctgtaggccacgccacagatcaagcactgcaaagagtgatccgcgaggtgttcaaaacgtccactgcactgtgctcatgatcgcgcatcgactcgacagaattctcgactccgaccgcaatttggtcgtggacgacggctgcgtgaaggagctagcaacccccgctggtcttgtccagaaaggcaaggggtgcttcttcgatctcacggacgagggcggataccttgatcacttctcgggggagcacaccgctggtcatacccaacaacaacttgcgctgtcctgacgtccctaaacgttaactagcagagaagcaaaattgacatttagttagagcatcttcactgcggcgtaccacctattcgcgcagcaaacgagatattcattgcggctggtatcaaacctaaatgtattgaacgctttttcttcttctttctgagctggcctcatccgccaaagcggtccggtaattcacttgctgctacgccaaaccagtgctcttggtcgccgagtataacttctttagctcgaaatgcaactatttgccactctgcgttacaggcaccaaacgtgccagcttgccggccttggcaggatccttggcggcctgttcgaggtcactcggtgaccggtcttcttcaatttggacgaagcccgcgcgattccgggattattttccaacgtcttgagcgctccgtgtctattgagcaatttcgaaaagaagctgggattgtccatcttggttcctaacttctggatggaaggatcaggttaaatactgtacatgtaggttcaattcgatcgtgtttgtgctctatcatctttgctgactccgccgcaccttcgaagagatcggtagtgtctacaggctgtgacggcttgaaaaaggcgacgtacttcggcaaatcaggaaaagtacccgcataaatctgcagttatagctaatgagcagtaaaatctactgttaggactcacagctcttactaactaccgtcttcgtggcttctgctagccttgccctcgatagtcgcttcagcccgaagataatcgtaacaaaatttaaacttcggcgttagttcccgcttcagcttgttccattgcggcacataccgcacctcccacatcgttggtggagagtaattctgcatatctggtcgtactcgaatgctgaacgctgggtagtcgctagattcagccgatagcagcagcttcagtaaactcacgatagtttcgtgaaagcatgacgcaaggtcaacgacgttccagcctcggacgcccacagttacgtcaattctggtgcgtggctgatctggagaccgtgagcgcgtcgcgagtgacaacagtgctctttccgagaatgccacaccattgatctcaatcgtttgaaggttacagagtccttcaagggccccaaacccgtccttcgtgaacgcattactagggccaaacccatggtgggctgaagattcgaccagcgctagacgctcaagcaacggacacgcatcgacaatcgtccgcaagaactgatcttcaagaagatcagcgtctccttgcatgtctgagagtaggacctccaacgacgtcaagttcgggcaggcgcgaagcacggcagaaaatgaatttgacggggacaacggctcgacgtgatgtcgctcttggagaacgtagtcgcgcctccaaagtgcacaatttccgggcaacactaaggacctcaactccagcttaggataaagcccgaacacattaaacacttcactgctgcagggtaaactgcaccagttgagtgccgtcaagtggctgcaaccttggcagaacgcctcccagctctggagggccgagtttcgcatgtcgacactcgtaaggcgccttcgtctggaaaatgcggcaaggcgtaggccttcgatgtgctgtaaatttgggcaatggtccccgatcgctgcagccgtggcatcgacgttttcattcggaaataaagacggaagctcgagtttcttcaagccacctcgcttgcccagccgtgatcgtgacgaagtatctaaagcagccaaaacagcatggaatgcttccagtacattatggacagatcgtcgacggtgcatcagatgcgcctgctgtggcatcaccagctcttccagattgacacagtgctcgccaacagcgctcatgatgcctgggagatggtcggattccagaggaacgccagataaatccaagcgaacaaggtacttgcaattcgagaagacattcctccaatactgcagtacgtcttcgccacatatgtcgtcgacgtcatagacagtcacatcgtgtgggtcgttcagccaaagctctactcgtcgtcgtgggtgcctcccagccgtcacctcttgcagcagccttttcaattcgttgtcaacgtgttttgctttacgttgcacctgtaatttcttcctgttttgtagcatcaactcgtgcgattcttctccctcctccgatgggcgtcgagaaagtcgattcgttgcggaattcgacgcacacgtgaaagcggacaaaagttctcgcacgaactggaaaatgcccccaggggccgcgtcattggctgcagccgtagacttaagtgcttcgtcggtcgtggtgtctttgcattcgtcttgttcattgttgatgtcaggatcttgctggaagtcgaacaccaggatcgaatcgcggaaatgaccttcgaccgcttgaagtgcagacgcccaggacgtggatacagctgcgaggtcgtggatgccccgacgataaaccacgcgtctcttatttgacagcaattgggtagcaacgtctacgtgcaggaagctcaagacgttgagcagcgccgactccggcaggtcatccaagcgcatcgctattgtcgtctccgaatgacatggctacaattttgcaatttccgatgttgtgattagtagattggtagttgtgtgtgctacgtaatgtagccattttctgggtggtggagcagccaagcggcacaacgtcaacagggtcaagcaagtgcacgtgatacattcactcactacctatcaccttggcgctacgacagctgcagcaccatgtcgagcagctacaagcagaagaagttgaagacgctggcgacgcgcaagaagacgcgcaaacgccgcatggaggagggcatgacgttcgaggacgactcgggccgactgttccagccgccgagcacgcgcgacccgcgctggaagaagccgtcgatcgaggcggtggtgtccggcatctccaagagcaagcggcagaagaaggcggagaagaagcgacgaaagctcgctgccaatcaggaacaaaatgcaggcgaaaacgatgacgacgagattgaggtcgtccaacggggagacgccagcagcgatgacgacggaccggaggaggagcaggacgacgaggaatcggcaactggagacgacaacgacgctctgttcgatctgccgaagacgcctctgcgactgtgcaagtcgctggacgacgtggtggccaaagcagcagcgaagcacgcggagatccggcgcaaggacggcagacagaagatcaaggtgctgctgctcgtggacgcgcgctcgattttcaagctcatgaagaagaacatgaacatccgccccgagatggtgaagcccaagagccgactgggcgtgggctcggccaagaagccggagctcgcgtacaagaacacggggctggtgaagacgccgctggaccgcttcaaggacgtcaacaaggcggtgctcacgggctacaagagcggcaagctgtcgaccatcctggccgaggacctgtcgttctacccgtacaccgagttcaaggtgcagcacgtgatcttcgtggccaagcaggcggcgtcggctatcaacctggaccgcaacctgctgcgcaacgtgaagctgcactcgttcgtcatcgacgacgagagcacgtcgggcatctctgaagacgacctcaaggcgctccacgccgcgttcgacgtcacgagcgcgtaggcgtacaccagtacacaagcttctcggtggttcattattggcagcagtaatagaggaggcgcagttttgctagcggatcgatgctgcctactcagagtctaccgagcccttgctcgacgcgcgccatgttacccaccacgtcacaggggacttgtccccgtttttggtgcttcgatttttttgacttgacttcagtatggcgacctgatttacgcgcgtggtccacaccagcaacggccgatccaaaagcggtagccaagagaagatcccattgaagcacttgccggcccgctgcccaagccgtcgctagccgtctcttcctccgcagcttcagcttcagccatggccgacgtgggcatcccgccaatcaatggcgcagatcccgtccccgtccccgttgacgcccccaccgccgcgcccgaggtgtggtccgaccacctcaactcgaccgactactcgctgctgctggggctgccgctgggctcgctgctggccattctgttcgtgctgcgcgtgctgtggcgccccaaggcggggcccaagttccggctgcccaagcaggtgccgacctacggcagcgtggcgctggacgacgacagctacgactacgacggcgactcgaacgacctcatctacgccggccaggtggcgggccgctacgacacgcgctggacgcgcaccttcgacttcgtgttcctcgtgggcatgctgctcttcgcggcggcgctcgcggggctcacgacgctgctgcagcccgagctctgggacaacacgagcttctggttcttcctgctgcccaaggtgctcatcatgatgggcgtgtcgacgctcggcggcatcatctgccgcttcttctgcatcgtggacgacgccggctacgtcatcaccgagcgcagctccgtcttcaaggtcaactacacgcgcaagttccagctgctggcggcctacctggtgccgctgctcgtcaagcccgacgaggagtcgtgccccgtgtgcaatgggccgctggcgctcgcctggggggactttgtcacgctcttctgcttcctgctgctcattaagcccatccgcgagcgctcgacgctcttcatgctgcagttcaactcgctcgaccgaccagaggaccgaccgcacacgctcaagtggatcgtggcgggcaacgtcttccccggtttgttcgtgctgctcttcttccgctggctgttcgcacggacgacgcagtccgacctcgtcttcatcctcgtgttcgtgacgagcatcggcgacggactggcagagcccataggcatcgcgttcggcaagcacaagtactcgaccagcacgtgctgctccaagcgcaagtacacgcgcagtttcgagggctcggcgtgcgtcttcctgtcgggcatcgtgttcccagcgctgcagtacgccgacttcgagacgcccatgcagctgtggcttacgatgatcatcttgccgttcgtggtggcctacgcagaggcaacagcgccccacaccatggacgcgccggtactgatggcagccacggggcttgtgctctacaccatcatccacatcttttgaagtgagcaaacctacctacctacctacctacctacctacacgtgcagccctctgagatcaatagctagcaacccaggaaattcacgatgaacagagctggcgatttattaacttggtgctctactcttcataaatgacgtacccttgaggcggagcaggctgcgacggcgcgtgttcctttggaggtggaggcgcgaacgtcttcttgccctcggagaacttggccagcgcagccatgtggtcgtccgtgaacgggtcggcagccgaggcgtccgcctgcagccacgggtgctgtagcgccattgcagcaggcggacgctccctcggatttagcactagcaagtactcgatgaacttcttggcctgatgtgacaccttggactcgagctccttggggtactcgaattcgcccttgacgatcttgtcttccacctgcgagaggaaccgcgcgtcgaacgggaactgcccaaacagcaagacgtacgtgacgacacccagcgaccagagatcaatcgcccagccgtagtagctgtgtttgtggaacatctccggcgccatgtagtgcggtgtgccgttcatacccgacatctcgttgccgcccacggtgcccatgtgagccagtccgaagtcaatgagcagcacaccgtcctgcaggtccttggtcttgcacagaatgttctccaccttcacgtcgcggtgcgtgataccgttcaggtgcaggtaggccagcacgctcagcaattgtcggacgatctccgccacgtcgcactcgcgtacgcgcggagctcctggccggcagatcgcgtccatgacctctccacccgtggccttgtccgtcacgatggcgaacttgtcgtcgtcctggaacaccttgcgcagccgcagcacgcccgggtgcttaactctggcgaggatggccagctcggactccagcgcctctacgcggttgggcgtggacagatactcctggcgcacgaacttgacggccacgtcctcgtcgcactcgcgctcttcgcgttcccgctgctgctcctccgccagcgtcttggcgcggctgcggtagtgcgggcgcttcctcttggcgacgaacacctggccggtcttgccctcgccgagctggtacagcacgtcgtacgagtcctcgaacgtgggctctttcttgtcatggtgaccaagcgccagcatgcccgacgcggtcatgcggccgtcctcgacgccgtcgtcgcgcgcgccgcggcggctgaagcagctgaaacagcacaacattggtggtgcgagcgggactgtggctatctatgtgtgacgagtatcgagcttttcgatggggcgggcagctcttgacagcctgcacgcggcgtcgtgctgaacgggagtgcgtggcggaatggccgcttcgtgcagacgacgaaaaagccagataatttgacaatacggaatgctacgcgaaatattcgacatgcatgaaatgtgacagtactgtacgcacctgggacttcaacggcagaaagcaagagacagaaggcacgtggcgggagagccccgcttagccatgttccaaactgacatgcgagcacatgctccgttgtccagtgacattgccagcatttgtgatcgctgtagcagaactgcagctggtgtcgtcgctacgcgctgcttgtctacaagtccgccaagcctttttgcgtttggttatcgtgagtcgcacgttgggaaggcttttaagccttgttaaaacaagccagcgcactgcgctgcacagcgggaaccacgagctgtgcgggcgtcaattcactgacgcaagcgatcgaggttgggaagtgataggatcgggtcgagtgtttgagacggccacacggtgcattcggggtaaaagttacgaggagcatgccccccaaaaatgggggaatcccgagaaattaaagaaatttatcacgtgttttagcctttcggctaatgagctctcgccgaagcatttctccttacccctttgcttacatgcagcccttacttacatctagcattttcactaacaattgtgaccggtattcccgccaaagtggatagcttgcagcaacaccttacacaaggcttgtttttttttaaggttttgtacgccacataaattttcgtttccagcttcagtctctttcgagccgcgtcggaccagcatgaggagctgcttcgagacggccatgatgctgaccgtgacgggggtcaccaacttctgcatgttccccgccatctatagcctctacagtcggcagttcgtcttcgaggtgcagtgcattgaaatgccatcagctgggctgctcttgggctggcacaacggatccgatctaacgcgtgtcatgtttgcgcaggcgttcatcggcatgtttaccatgaccaccagcttcatgtatcacgtgtgcgacagcatcgacggcccgctgtggctcacggaagggcagtggcacagactcgacaacatcggctccatcatgagcttcatcatgtgggggatccacctcatggacctgcgtcacccggtgctggagcggtatgtgcagtacttcttcctgggcatggtgctggtcttccaggagaaaaatccgtgggacgagtggaactcggtcatccccgtagtcagcagcttcctgctgctgctggtgtcgttcgcggtgaggaggcgcgtgccccgatacgactatcagccgttccgacgcggattgctgctgctggtgtgcggtgttgggtgcttcgtgcgcggcctggacgacgacacggacccgttccgctttttccacggctgctggcacagcttcgtgggggcggcggcgtactacaatttcaaggtgctgcccgaccgagaagacaggagaagctcgcacttgcccatcaagaggcaagactaaatgagcgatgaagaagcaaagcgaatagagtccaaatacaggacgttggtgtaagctgctggtcacgatgaaagccgcgaaaatttattgtgctcgtttcggcgagaatagatgatagtttgaagtacactgtacaaccgtcgagtttgtagcctgccgaaatgaagagtgcatgtaatacatgcaacgagcatcgagcacaactttggcaagcattggcagcatgaagacaggcaggcaggcaagccgatagtctacgttgatgatgcgacggaacgcccgctcaactcgacaacacccgcaatcggaggaaaacgacaccacggcaaactttgccgttgaccacggtgagatcgcgtggtccgagaggccgagctctactccaaagtatcctacatgtatacgtatcttggttgctcacgtcgcagtaacatcacttgccagaacaacttcgagttaaattaaatggacacacatggatacactcacctgtctgtctgcattatgcacccattttgaccaatcacatgtccgtcgccacaccccctccggccggcatgggcagctacggctcaatcccgcaagtggacggcgccgaggacaagccagacctcgaggaacagcagcagcacaagacgctcgccatgagcctcgccaaccgcgtgtacgcctacgacctgacgtggtccaccaagctctaccagcgcttcggccgcgacccgacgccgcgtctgtgctgggagattttctcgcactcgggcgatggcttcctgtggattctgaccatcccgccgctcatggggctgctctgggcggccggcctcatcggccccttcgagccggccaccaaaatgctgctgtcggcgctcttcaccgtcatgacggtcgacatcatcgccatcatgctgctcaagatggtgtttcaccgccagcggccgcccttccacgaggcggacatgcgcttcgtggggccggaccagcactcgttcccgtccggccactcgacgcgcgtgtgggccatggtggccatgctcgtctacctcgccgagacgcacccgtggattctccgcgagttcttctacggcctggcgccggccgcactggtcgccgtgtccatcgtctgggcgctggtcatcaacttctcgcgcgtggcgctcggccgccactacccgacggacgtgctggccggcacactcatcggcttcttcgtgttctggcccatttcgctcttcttcatccaccactacggcatgctggacgcgccgcccccgccgtactaagctagggactgtagatgggggaggcgagagcacgcagctagagaccgttccagcctcagttgtagtgctgcagggctatctggaatgattcaacaagatgtaaccttgcctctcgtcgttggtgttaatgtgtcggggcgtggcgtccttctggcgctgacaagcacgtggcgccgtccatctcagacatttacagttactgcgtatccccctcttaagtgtatccatcgctactatttatatatcttacttgaactaaatatcgcaatcgctgcgtttgattgggtatggacgctttctaccacaggctctgcgataagtgatactctgtgagccgattctgaaggagaagagctgccgcgctccattttcgcgtgtcaaattcgactcgacggctcttgtcgaggggcattgggcctttttctaggttggagctcccatctggcctccagcgcctatagccctgcgcgccctcgagtttctcatcgagccacattactcaccaagtcggcgttctcaagcttgcagtcgctggacgtcctcgcgtcgacgccctcagctccattttcagcctctcttcagcctggagagaccagactctaggacgcgccttccagggtgcttcccccaatatagctgctgcaggcaggatccacacggacgagcgagctgtatcatagtcacagttcaattcagattgcgcggcgttcgatgagcgcagccattggcttcggcgaatacgaggcattgctgccctgcgacggagtcaacgcggcgctaacgtttagccgcgagttcttcagtcgcgagtatgtcgtccaacgtgtgacgagagaggcgttggccgttgcactggaaacggacgagaaacggtggcgcggactgtcgaggatcaattcggggcacgccgtggtcagcattgacggcgtgccagcgcgcggcttgccgtcacgccaattcgctgagctctggtatccgccggtaactccagagacgtcggatgcggtggatcgacggtaccgccgcgttcgtttccgtgatcgcaaacgcgcggagctcgaggtggagatgcagaaggactgggcgggcgcgggacccatgcgcttcacaccgctgcaagatgacgcagagctgcagaccaagctgcgtgaggcgcacacgctgatctgggagcatgagctctcccgggctcatgcggtccttcggtcgttgccggttggtagtgacccgatggtgtgtttggtggcggtggagctggaggtagtgcgcgtactggtgtcgaaggatgcgttgtatgccaagcaggcccagcgcgcagcaagccaggctgtcgcgtggcttgagagcatgacggagttgtcgtcgctctcgtactcgaccagaaagcagacgcaactcgctctggcggaagctctctttctctcggctctgctgcgtcttggtggcgatcaacggcttgctgcgatcgccgcagcaagacgttgcgctgctatatacgtggagctggaagagaagttcttcacaagtcgcgattcaacgaagagagaccggttgttgatgcccgagagcgaactgcaagtgtttcagaagagggtccgttttggaatgggtatacttcatgtcggcggagctctggcgctgcagagtgcgctggactggattggcacgttggttaaaggagcgtgcgatatcaagaacggcctcgagtatttgctggactgcggcaagattaatgaaggcagcgagagccatctccaggccaactgggccgccttggctctcatgtacagctcgggtgcgcttcggctcgttcgacaacgaagcgagcaagagattggtgactgccttactaaagagattggtgcctgtcagcaatccacactccagcgacatccgaaggcgctcgtattcctctggagccaagcaaacgccacaaacttcgtcggtcaccggttcaagcagctcgaagttgaactatcacgggtctccgaactcgaggagagagttcaccttgtgcggtttgatcttggatatcgacactttctagcccgtgagtttggtcgctcttcagcacagttcatgcctatctgcaagtgcaccagcgcgccggcaaaactgcgtggactcagcagtgtcttcgtcgcggtaggctaccttctgacgagcgaggttgatgccaagctattgagctcggtgcggctgttgttgcggtccgcccgaagattcttgacacttcggttggaggacaacccggaagacttcgaagctggatcgttgtacgagcgaattggggcatatttggatggcggtgacgagtatttgcagcttctaccgtcggaaatcctgtacgtctactgccagtccaccaagacgatcatggtgggatctacgctggaaacgtgccagccccaacaccatcttgcagcacttgagaagataacccagttgtcgaaacttgcgagagccgatggaaaccaatccaaccacgaagcagagctgtgtctccttcgtgccatcatacgcttcaacctacgagaatttgacgcctgtgaaagagagctcaagacgatatggagtgagctcctcccgcaaggcagtcgccctagaacagactccgcgctcagtcggctcctcagccagcggactccatgcccacctccagcgtttgtcgctctggttgcatggttctaccagctcagactgctgctcgagcgcaggtgttccagatcgacactttcatccattgatccaaactcggtgtcatcaccgaagtgcagcaagatggacaccgcgacacaagagactgctcctagctttgcaggcgctgtccaacaatccccgtatccatatcaccacatctacagcggcaagctgcaggcgcttaacaaactggtcacgcgtctggcaactgaaaagatcgacaacaactcgagctgcagtagcccaaccacatgcaacacacagcactgacaagcaaacatcattatttattgcttcaatacatgcactgatcgatccacgcatacaacttgtggatacataaatgcttacagcaagtagaccttggtcagatagattaggcggcgtgtgtgtccgcgacctcgtcgtcctcgtcagcattcgtgccgcggcgagatttggtcttcttccacgcgaaacgcgtcgggaaggccggcttggacacggtcggggcggtgaagcgaccgaaccgagacttgctcttgggcgcttgctgggctggcggcgaatacaggaacgtgtcctcaatttcttcctcgaacgacttcgtgctgcttgtgttgctggcagggagcgagatcttccgcgtgagcataccagcaaccgagctcaagccgacaacagacggcagagtgctggagcgagccttgcttgagtccgcgttcttgtcctcgtcctccagagacgacgtaggagagcttgaaggcttgctcgaacgacggcttgaaagcgcactaaggacactagcggcgcgccagcggctaccgctcttcttgcgggtagctggctcttcttcgtccttcgcttggtccttctcaacgtcgctggtacgctggccagacacgggcgagtcgctgctgaacgagctagcgcgatcactgtccgtgtcaaagtacttcgggccgtcacgggtttcgatgtcactgagactgcgctcgtcgaagtcagacttggacggcacgtcagcgtacgagtctccacgcgatcggaatgcatcgtcgtacgagtcgtcgcgcgcccggaacacgtcggcgtaggaatcgttgcgagagcgcgtgtcgtcagcgtacgagtcaccacgagagcgagtttcatcggcgtacgagtcctcgcgcgaccggaacggatcgacaaacgattcgtcacgagggcgggacacaccgctgagcgaactcgatgccagactgcctcgaggcgtgtccgagttgaaggacggctcctggaagaatgacccagagcgaaccgatgagggtctgtcgaaatcggaaatgctactaggacgctcgctatcgatgtcctcagcagcagcttcctttacaggcgacggcgaagcaacgggggcagctgcatcagaagaaagcgtagactcgaaagacgagttgttgttctcgcttgaccagtggcggttctcctcaacacccgagctttccgctgagtgttcaatcggcttgtgctcttccatcgcatcgacaaaactgtcgctgctcgcatcgctcttatcgtcatcgaatgccgagtgctcttcaggcatcgaaaactccggcgccatgttcacgctgttggtcgacacccgaggggtggaatcaaggggtgaagggccttggtcactatcggtgtcaggaaccacatcggcatgctccgattccaaaaccaccgcttgagtggagactgtctctccataagcaggtggggcgccaacaaaactcggcgcgtcttcaaactcggagtcatcgtcgctgtcgtcgtcgctggaaaggttcgagaagcgcccagtctggctcaacatctgaagctcagcgatagtaggttgacgtcggatctgtggcttctctaggccgtcatcttgacgagatgtgtctgcttccgctgactgtcgctgctcgcgcagcgcctccacctttcgagcagcggcaaaggatcgccattggcactgaaggcgcacagccataacattctccttctcatgcaaagcttcagctcgtaacgatgcaaccttgacgcgggctagtacaccacgccacctgctttgaattctcaccgcagtcaaattctcgatgcgagaaagctgggtctggacatcagcaatagcggcagaccgcattgaagccacctcagaccgggctacagaaccccgccagtggctctggatcttcgtcgccatggcgctctcggcctccgcctgacgggccagctcctcctgacgagcaagctcctcttgttcgcgagcgagctcttcctggcgagcagcttcctccgcagcggcagcagcagcctctgcctccgcagcagccctagcagcttcagcctcggcagcaacgcgagcagcttcggcctccgcctcggcctgagcagcagcctccgcggcagcacgagaagcttcagcttcagcctcagcctcggcctgggcagcagcctccgcctccgcaacggccttagcagcctcggcctcggccacctcggtacgcagcacagccacctcggaccgggctacagaaccccgccagtggctctggatcttcgtcgccatggcgctctcggcctccgcctgacgggccagctcctcctgacgagcaagctcctcttgttcgcgagcgagctcttcctggcgagcagcttcctccgcagcggcagcagcagcctctgcctccgcagcagccctagcagcttcagcctcggcagcaacgcgagcagcttcggcctccgcctcggcctgagcagcagcctccgcggcagcacgagcagcttcagcttcagcctcagcctcggcctgggcagcagcctccgcctccgcaacggccttagcagcctcggcctcggccacctcggtacgcagcacagccacctcggaccgggctacagaaccccgccagtggctctggatcttcgtcgccatggcgctctcggcctccgcctgacgggccagctcttcctggcgagcaagctcctcttgttcgcgagcgagctcttcctggcgagcagcttcctccgcagcggcagcagcagcctctgcctccgcagcagccctagcagcttcagcctcagcagcaacgcgagcagcttcggcctccgcctcggcctgagcagcagcctccgcggcagcacgagcagcttcagcttcagcctcagcctcggcctgggcagcagcctccgcctccgcaacggccttagcagcctcggcctcggccacctcggtacgcagcacagccacctcggaccgggctacagaaccccgccagtggctctggatcttcgtcgccatggcgctctcggcctccgcctgacgggccagctcttcctggcgagcaagctcctcttgttcgcgagcgagctcttcctggcgagcagcttcctccgcagcggcagcagcagcctctgcctccgcagcagccctagcagcttcagcctcagcagcaacgcgagcagcttcggcctccgcctcggcctgagcagcagcctccgcggcagcacgagcagcttcagcttcagcctcagcctcggcctgggcagcagcctccgcctccgcaacggccttagcagcctcggcctcggccacctcggtacgcagcacagccacctcggaccgggctacagaaccccgccagtggctctggatcttcgtcgccatggcgctctcggcctccgcctgacgggccagctcctcctgacgagcaagctcctcttgttcgcgagcgagctcttcctggcgagcagcttcctccgcagcggcagcagcagcctctgcctccgcagcagccctagcagcttcagcctcagcagcaacgcgagcagcttcggcctccgcctcggcctgagcagcagcctccgcggcagcacgagcagcttcagcttcagcctcagcctcggcctgggcagcagcctccgcctccgcaacggccttagcagcctcggcctcggccacctcggtacgcagcacagccacctcggaccgggctacagaaccccgccagtggctctggatcttcgtcgccatggcgctctcggcctccgcctgacgggccagctcctcctgacgagcaagctcctcttgttcgcgagcgagctcttcctggcgagcagcttcctccgcagcggcagcagcagcctctgcctccacagcagccctagcagcttcagcctcagcagcaacgcgagcagcttcggcctccgcctcggcctgggcagcagcctccgcctccgcaacggccttagcagcctcggcctcggccacctcggtacgcagcacagccacctcggaccgggctacagaaccccgccagtggctctggatcttcgtcgccatggcgctctcggcctccgcctgacgggccagctcctcctgacgagcaagctcctcttgttcgcgagcgagctcttcctggcgagcagcttcctccgcagcggcagcagcagcctctgcctccacagcagccctagcagcttcagcctcagcagcaacgcgagcagcttcggcctccgcctcggcctgagcagcagcctccgcggcagcacgagcagcttcagcttcagcctcagcctcggcctgggcagcagcctccgcctccgcaacggccttagcagcctcggcctcggccacctcggtacgcagcacagccacctcggaccgggctacagaaccccgccagtggctctggatcttcgtcgccatggcgctctcggcctccgcctgacgggccagctcctcctgacgagcaagctcctcttgttcgcgagcgagctcttcctggcgagcagcttcctccgcagcggcagcagcagcctctgcctccgcagcagccctagcagcttcagcctcagcagcaacgcgagcagcttcggcctccgcctcggcctgagcagcagcctccgcggcagcacgagcagcttcagcttcagcctcagcctcggcctgggcagcagcctccgcctccgcaacggccttagcagcctcggcctcggccacctcggtacgcagcacagccacctcggaccgggctacagaaccccgccagtggctctggatcttcgtcgccatggcgctctcggcctccgcctgacgggccagctcctcctgacgagcaagctcctcttgttcgcgagcgagctcttcctggcgagcagcttcctccgcagcggcagcagcagcctctgcctccgcagcagccctagcagcttcagcctcagcagcaacgcgagcagcttcggcctccgcctcggcctgagcagcagcctccgcggcagcacgagcagcttcagcttcagcctcagcctcggcctgggcagcagcctccgcctccgcaacggccttagcagcctcggcctcggccacctcggtacgcagcacagccacctcggaccgggctacagaaccccgccagtggctctggatcttcgtcgccatggcgctcttggcctccgcctgacgggccagctcctcctgacgagcaagctcctcttgttcgcgagcgagctcttcctggcgagcagcttcctccgcagcggcagcagcagcctctgcctccgcagcagccctagcagcttcagcctcagcagcaacgcgagcagcttcggcctccgcctcggcctgagcagcagcctccgcggcagcacgagcagcttcagcttcagcctcagcctcggcctgggcagcagcctccgcctccgcaacggccttagcagcctcggcctcggccacctcggtacgcagcacagccacctcggaccgggctacagaaccccgccagtggctctggatcttcgtcgccatggcgctctcggcctccgcctgacgggccagctcctcctgacgagcaagctcctcttgttcgcgagcgagctcttcctggcgagcagcttcctccgcagcggcagcagcagcctctgcctccgcagcagccctagcagcttcagcctcagcagcaacgcgagcagcttcggcctccgcctcggcctgagcagcagcctccgcggcagcacgagcagcttcagcttcagcctcagcctcggcctgggcagcagcctccgcctccgcaacggccttagcagcctcggcctcggccacctcggtacgcagcacagccacctcggaccgggctacagaaccccgccagtggctctggatcttcgtcgccatggcgctctcggcctccgcctgacgggccagctcctcctgacgagcaagctcctcttgttcgcgagcgagctcttcctggcgagcagcttcctccgcagcggcagcagcagcctctgcctccacagcagccctagcagcttcagcctcagcagcaacgcgagcagcttcggcctccgcctcggcctgggcagcagcctccgcctccgcaacggccttagcagcctcggcctcggccacctcggtacgcagcacagccacctcggaccgggctacagaaccccgccagtggctctggatcttcgtcgccatggcgctctcggcctccgcctgacgggccagctcctcctgacgagcaagctcctcttgttcgcgagcgagctcttcctggcgagcagcttcctccgcagcggcagcagcagcctctgcctccacagcagccctagcagcttcagcctcagcagcaacgcgagcagcttcggcctccgcctcggcctgagcagcagcctccgcggcagcacgagcagcttcagcttcagcctcagcctcggcctgggcagcagcctccgcctccgcaacggccttagcagcctcggcctcggccacctcggtacgcagcacagccacctcggaccgggctacagaaccccgccagtggctctggatcttcgtcgccatggcgctctcggcctccgcctgacgggccagctcctcctgacgagcaagctcctcttgttcgcgagcgagctcttcctggcgagcagcttcctccgcagcggcagcagcagcctctgcctccgcagcagccctagcagcttcagcctcagcagcaacgcgagcagcttcggcctccgcctcggcctgagcagcagcctccgcggcagcacgagcagcttcagcttcagcctcagcctcggcctgggcagcagcctccgcctccgcaacggccttagcagcctcggcctcggccacctcggtacgcagcacagccacctcggaccgggctacagaaccccgccagtggctctggatcttcgtcgccatggcgctctcggcctccgcctgacgggccagctcctcctgacgagcaagctcctcttgttcgcgagcgagctcttcctggcgagcagcttcctccgcagcggcagcagcagcctctgcctccgcagcagccctagcagcttcagcctcagcagcaacgcgagcagcttcggcctccgcctcggcctgagcagcagcctccgcggcagcacgagcagcttcagcctcagcagcaacgcgagcagcttcggcctccgcctcggcctgggcagcagcctccgcctccgcaacggccttagcagcctcggcctcggccacctcggtacgcagcacagccacctcggaccgggctacagaaccccgccagtggctctggatcttggtggctgcgtctcgttgctgtcggagctgagctaactcgttgcgtgcctgtcggcctgccaatattcgtgccgcgaaatcttggatctcatgggctgcgtcaatctgcttcgtgtattcggcctgagcttggcgccgacgaaccacagcctgaagtaatatcgctgctgccttccggactgcgatatcagactgatagcgattccgttgggaacggcctcgcacaatcttttggataaccaccgcgcacgtctgctctctttgtagctgctgacggagagcctctaattgcttctgtgcctgccgtcgccggaattcagtctgaattcggatggcaattctctccgatgctgcaagcttctcgctgtaagcctcgcgcgcaatcacgccgcgcactcctgactggatttgcgtcgccatgtcatttttccgctgggtttccttacgatcctgatccttactgcggaaagctcgcgcgccttgagcataagccataccattgaacgttagaggtttcttgttctgcttggccagttcagctgtgagaagcaccaatgcggcgtcagttggggtgctttacaaacatgtacaggtgaagggaatacaacggttcgcaccagctttacgatccatctcggcgaacttctgagctgcagatctgacgtcgatcttggcttcgtcgacagaggccttgatctgctcaatgtctacttctatcggtggacaagaattcaatgtgagcttatgacctcgaacgcctgtcaacaaagtaaacgtaccgtcaatggattgcttccgggtcgactccatagactcgaccgactcaatcgacatcttacggttagactcccacgacgccttgcgtgcggcatcatccaacgccttccgctcgtcgcgcgctcggctttcggctgagatagcaagcagtaaccatcagcacattagggcctcacaaaccagaatagtccatgacaagatactcaccgagctgctcttggaaccttgcgagtgccttcaaggcctgagggctaggcttcttgatgcgtgaggctgggtctgtgaacgggtagcgcttggctaaatggcacaacgcacgaacagtaaggtaagcgacagaatcatcatagcactccaagcgcacaagacgaaccattcggggtcccggtgccgctcttaggcaccatgaagccgttcttcatgacatattcatgcgagacgtcgtgctggtcgtacttcaacagcgccgccttggccttttcctcggcctctttctccacctgcgcgatctccttcgcgtgcacgtacgcgtggtcgaagtcgggcgaggagaagttgttcttggcggacgcctccttagcgctctgctctttctgtcgctccagctcctgcagacgcttcttctcctcaagctgctcctcgaagtaggtcttcccgcccgcaaagttccgcagcgccttctgcgcgtcctgctccgacttcgtgacgttctcgcgctgcttgtggaagtggttgtacgagtggtcgtactccgtggagtaggacgtcgaggcgttgagggtcttggcgtcctgctccttcttgcgctcgagctcctcgaggcgccgctgctcctcgcgcttctcggcctcaaacgtcttaccgtcactcgtgaactgcgcgagcgactccttggccttctgctccgccgtgcggacgtactccatctgcttcaccgcgtggttgtacgcgcggtcgtgctccaagtcgtacgaagactgcttggccatggcgtcacgcgactcctgcgccgcgcggcgctcctgctcctcgcgcagcttgcgctcctgcacggcggcgtccacgagggactcggagctctttggggccgcggcgtacgaaggcttgtccgcgggcttgtcggcgcccggcagcttgatgggcgggggcgccgccgtgcggcgcttccaggccggcggctccgagttctgcaccgcgcccttgttgaacatggcgcgcaggttggccacgcggccgcgcgcctcggccagcgccttccgctcctctgtgggcgaacaagatacacattagcttaaggcaaggttgatcactagcagcagctgcgggacggacggggcacgcaccttcgttcataattgtactcttagtagcgggtgagtgtgagggccgctcactacgcgattggggtcctgctggagaggcaatcgaggagtgaggccgcggtcggaggggaggaggagcaggagggtccagctgacgcgggtcgcggctggtttcagaatcttgccggcgcgtgacgcagtggcgcacctgatggctccttggtgtcggcttggactcgactcggcttgggcgcgtaggtccacgaatgcctcgccttgtacgtggcgttcagaaacaatctcgacaatgctcgccacaatgcggcaacggagcgcgccggctttcacgcgtcccacggtcatctctcccttgccaccgtcctcgtcctagacctgcatgcgattatatctgtacccatacgagatgttgagccaagccgggtatgaacagacctgctatagttaatactcgaaaaagaaagtgcagtgtgacctgcgtagtcggtcgtgctagcgataagcaagtgctaccgaccggtgacgcatcgacccgcggcggtgattttttagtttgttggcgcttcgctcgctatgctcgctccgctattggagcagactgcctacgcttcgctacggcagtggcggacccgttccgctcgcctcgtcggctcgctgcactactctcaatgttaggttagtactacagaggccggggcgggtcctgcggccccgtatggtggggtcgccttcggcgacggagccgccttcgctgcgctcggcggctactcgtacttagtaggatccgtacttagtgaataagcgtgacgattttgtgacggacggacagcgcgtctttctgattgattctttagactagccgagcgccgccgctacgcggcggtagttatgaggttagttgcagtagagtgggccgcccacctccgcttcgctccggtgggctaattagttcggcgtgtttgtgtaaaacttgtcaaaaatacaaattcaaatgcaaaagaacacgtattattcaaagttatgtgcaggacgcccacctcgccgtgactacaccgtctcgaaaatttgtctgtacacgatgttcgctgtgtacgctccatcatcttcttctaactcgggatattcaatcaacgccttgaccttggatcgggcggtaacccgggagagcgcgacgtacagctggccgtgtgagaagcagggagacgcgaggtacaatccgaggttaaacaccgtttgtccttgggccttgttgatggtcatcgcgaacgcgggctgtaccgggaactgcttacgcctcaagcgaaacgggaagtctcgagcgttgtcgtcactgatgaatacaatcctgggaatcaacacgttttttccgcggcgctcccccgtcatgatcttcgcgtggatgacatgaggttttagcttcaccacccgcagtcgcgtgccgttgcataggcctaagtccgggttcagatttcgcatgagcatgattggtgctcccaccttaagcgtcagtcggtggggtgggataccgttaatgttcacagaattcaggacttcttggtcgaagaagttgctgtcttggtcgtcttgtactgagtcaatagagagataatcttgggcgtcaccctccaggcgcgcagacaccgcatcgttaatacgttgaaccatagcattagtcgtcgtcaagatagtacggcttgcgaagtagtaatcgccgggttgttgatatccgcatacatggcatcaaccatccgagttaggccaattgggatagcccctggcatgatctcagcgtcctcgtctggttcttcaggcgggttctcaaccaacatgtcccgcgggatcttcatatagtcgcctccaagggcagggttcacctcgtgtctgccttcaccaacttgtagaaggaactcggaaaaggctgccagctcagtcgctgtgcttgcgctgtgggccgaccgcactcgcatgttctcggtgaggtgggcttgttcgaagtgctgccataggctggacgacttcagacaggcgccgatcgttttggcaggcgtgcctctcactaccacgggcagaatttgccgaaaatcacctgacagtacgaacgttttcccgccaaacggttcttgatcgttgtccatgatatctcgtagactacggtcgacagcttcaaaggcatggcggtgggtcattggcgcctcgtcccagatgatcagactggcctcttgaattaacttccggagtttggactgcttgtaaagcgagcaaggcgagtattcattcagcttgagaggaatcttgaacgtagagtgcgcggtgcgcccacccaccagcagtaaagccgcaatcccgctagacgccaccgcaagtgcgacctttcccgaaaggcggacacttgcgaggatatgcttgagtagtgttgattttcccgtaccacctggtcagtcgatgaagaacagctttttgccaacttgaggatattccactgcatccataaccttttcgtagatggcgcgttgaccttcgttcaggtcaccgctacgctcgtgaattcggagtaacacatccggctcgtagcctgtccgttcccggcggataaggttgttttccagcagagattccagaaccaaaacccggtgctcgctcaactgcgggaggtcaaagtcatgcacggcatacccgcttatttgcaagtggtcgttaagtctcttgagcgtgtggaattggacagtatccgccttggtctgaccttcaagattcttgtacttcttctcgatatcactggaaagttcttcgtagaactgatcccacaacgcccgaacgtctgtaacatgggaatacaccagcaacgttgcgaacagctggcgcagttgcttcggcatcttaaacgttgcggcctccgacatgcatgcgacccactcttgatcgccgtccagaaagccggcgtgcttcgccgccaaatgatacgtgctgtaaaggactccattcacagtgcgggcatcctcgaaggaagtcggtcccctgtggtgacatagtaacacgcgcagatagaagcgctccatatctctgggtgaaacgtggatcaagcgtccaatcaccgcctggtagttagttctacgaacccactttttcgccttgtcatcccaggaaaattgcttcgggatatcttggtacaacatggtcttggcaatctggttgcttgggtcttcgctcgcacatagctcgaaaaagctcgtccacattgtacgtttccgccgatctgcgaccgctgctgggtcctcggtgggttggaaaatcaccgcctgaccatcttctaagtgaacggtaagcttcgtaacggagtgtgtcttgccttggatatcgtacgccaaaagccgcatacatgcctctaccggtgatatgtatctggcgttcaaaaaccgtaggatctcgttcggcttcacacgggggctgttggggtctcgcacggcttcaatagtaatcacagctctgtcggaccctttgtatacgtacttgtacagatacttcacagccgtaattgccgtacacacctccacgttgatgtggcaattgtacttttgcgaaaggtacgggttgtacggaaccacccactggttcactgtctcgttgtcgtacgtcttgcctttgtacgttagagcccccgtttcacgccggcgccgcctgtagacagggtacccgtcttggtttgctcgagtcacttctaccaacggcttcggataccccttactgcacttcccgtccgtcatgcttgggctcgtagggttcgcagctccgcacggaccatgcatcatgcaactcatgatcgtttcgtacagagcaggattaacgtccttgtcgggcacctccgcagacaccaacttgtcaataatctcgcgagtccgaggcttgtctccatcctccagaatcgtgagaatgtgggcgtgtggaaggccgcgcttctggaactccactacgtacattcgtgcctgtaggcggccgattataccttcgtccaaatccgctaaaagggttttgagcttttgttgccagacccgggcaacaatatccgggcggtcttgagcagtttgaccctcagggagtttttccaggatctcttcccacttggtattgcacgtcttggtaaggaacacgtcagatttcccgtactcgcgaactatagccattgagtcttggtacgccttgtacatgtagcgcgggccaccgacatgcgagtctgggaggataacccgtttaccgatttggcccagaaagtgttcatcttggtcgctgcgtctccggtctgggtgtaccaactcgccggtatcccgattgaattcagacacaatagcttctccttcacctagcgtcacagccgtctcattgagcaacgcgtcttgaacgccgtgatactggtccgcacggatctccttctgatgcatagccacccatcgcaactgctcttgttcacacttagctcgctggtcgaccacccactgctggaagagccgacctccttggaatagagccgattgatcgcaatccttctggaacagtcgataagcggtatgctcgcgcagcgccatcttcgttttcttcctgttctttgctccgtccgcgtacgtgtttgtgtacgtccatccgaggtcgccgtatggaaacagcaggggatattgaagtggatcatacttctcgtcggtctcgaataggcgcaacagttgctggtctttagcgtagtgaaccaggtcgcgagacttgggaatgttaccatccgtaacgacaacggcgccgacttccgaaaccgttggcaagttgtgcgtccctggatgggaaggcttggcctgcagcttgtacttaatgtccatgatggggatacctttggccaaatcctcccgcaacttctctccaaactttaggaattgctgcgcgaacggattgcaccgctccatcatatcctcgatgtccttcaaggcgacgttgtccagatcggcgtaaatgcttttgcgtcgcttggcgcgctcttgcatcacgggatccacgatgtagatctgagcgaactttggttccgtcctctcacccgttgcgcggtccacgtaaggcagcatagatcccaagtaatgccccattgcgcnnnnnnnnnnnnnnnnnnnnnnnnnnnnnnnnnnnnnnnnnnnnnnnnnnnnnnnnnnnnnnnnnnnnnnnnnnnnnnnnnnnnnnnnnnnnnnnnnnnnccttctcatgcaaagcttcagctcgtaacgatgcaaccttgacgcgggctagtacaccacgccacctgctttgaattctcaccgcagtcaaattctcgatgcgagaaagctgggtctggacatcagcaatagcggcagaccgcattgaagccacctcagaccgggctacagaaccccgccagtggctctggatcttcgtcgccatggcgctctcggcctccgcctgacgggccagctcctcctgacgagcaagctcctcttgttcgcgagcgagctcttcctggcgagcagcttcctccgcagcggcagcagcagcctctgcctccgcagcagccctagcagcttcagcctcggcagcaacgcgagcagcttcggcctccgcctcggcctgagcagcagcctccgcggcagcacgagaagcttcagcttcagcctcagcctcggcctgggcagcagcctccgcctccgcaacggccttagcagcctcggcctcggccacctcggtacgcagcacagccacctcggaccgggctacagaaccccgccagtggctctggatcttcgtcgccatggcgctctcggcctccgcctgacgggccagctcctcctgacgagcaagctcctcttgttcgcgagcgagctcttcctggcgagcagcttcctccgcagcggcagcagcagcctctgcctccgcagcagccctagcagcttcagcctcggcagcaacgcgagcagcttcggcctccgcctcggcctgagcagcagcctccgcggcagcacgagcagcttcagcttcagcctcagcctcggcctgggcagcagcctccgcctccgcaacggccttagcagcctcggcctcggccacctcggtacgcagcacagccacctcggaccgggctacagaaccccgccagtggctctggatcttcgtcgccatggcgctctcggcctccgcctgacgggccagctcttcctggcgagcaagctcctcttgttcgcgagcgagctcttcctggcgagcagcttcctccgcagcggcagcagcagcctctgcctccgcagcagccctagcagcttcagcctcagcagcaacgcgagcagcttcggcctccgcctcggcctgagcagcagcctccgcggcagcacgagcagcttcagcttcagcctcagcctcggcctgggcagcagcctccgcctccgcaacggccttagcagcctcggcctcggccacctcggtacgcagcacagccacctcggaccgggctacagaaccccgccagtggctctggatcttcgtcgccatggcgctctcggcctccgcctgacgggccagctcttcctggcgagcaagctcctcttgttcgcgagcgagctcttcctggcgagcagcttcctccgcagcggcagcagcagcctctgcctccgcagcagccctagcagcttcagcctcagcagcaacgcgagcagcttcggcctccgcctcggcctgagcagcagcctccgcggcagcacgagcagcttcagcttcagcctcagcctcggcctgggcagcagcctccgcctccgcaacggccttagcagcctcggcctcggccacctcggtacgcagcacagccacctcggaccgggctacagaaccccgccagtggctctggatcttcgtcgccatggcgctctcggcctccgcctgacgggccagctcctcctgacgagcaagctcctcttgttcgcgagcgagctcttcctggcgagcagcttcctccgcagcggcagcagcagcctctgcctccgcagcagccctagcagcttcagcctcagcagcaacgcgagcagcttcggcctccgcctcggcctgagcagcagcctccgcggcagcacgagcagcttcagcttcagcctcagcctcggcctgggcagcagcctccgcctccgcaacggccttagcagcctcggcctcggccacctcggtacgcagcacagccacctcggaccgggctacagaaccccgccagtggctctggatcttcgtcgccatggcgctctcggcctccgcctgacgggccagctcctcctgacgagcaagctcctcttgttcgcgagcgagctcttcctggcgagcagcttcctccgcagcggcagcagcagcctctgcctccacagcagccctagcagcttcagcctcagcagcaacgcgagcagcttcggcctccgcctcggcctgggcagcagcctccgcctccgcaacggccttagcagcctcggcctcggccacctcggtacgcagcacagccacctcggaccgggctacagaaccccgccagtggctctggatcttcgtcgccatggcgctctcggcctccgcctgacgggccagctcctcctgacgagcaagctcctcttgttcgcgagcgagctcttcctggcgagcagcttcctccgcagcggcagcagcagcctctgcctccgcagcagccctagcagcttcagcctcagcagcaacgcgagcagcttcggcctccgcctcggcctgagcagcagcctccgcggcagcacgagcagcttcagcttcagcctcagcctcggcctgggcagcagcctccgcctccgcaacggccttagcagcctcggcctcggccacctcggtacgcagcacagccacctcggaccgggctacagaaccccgccagtggctctggatcttcgtcgccatggcgctctcggcctccgcctgacgggccagctcctcctgacgagcaagctcctcttgttcgcgagcgagctcttcctggcgagcagcttcctccgcagcggcagcagcagcctctgcctccgcagcagccctagcagcttcagcctcagcagcaacgcgagcagcttcggcctccgcctcggcctgagcagcagcctccgcggcagcacgagcagcttcagcttcagcctcagcctcggcctgggcagcagcctccgcctccgcaacggccttagcagcctcggcctcggccacctcggtacgcagcacagccacctcggaccgggctacagaaccccgccagtggctctggatcttcgtcgccatggcgctcttggcctccgcctgacgggccagctcctcctgacgagcaagctcctcttgttcgcgagcgagctcttcctggcgagcagcttcctccgcagcggcagcagcagcctctgcctccgcagcagccctagcagcttcagcctcagcagcaacgcgagcagcttcggcctccgcctcggcctgagcagcagcctccgcggcagcacgagcagcttcagcttcagcagcaacgcgagcagcttcggcctcagcctcggcctgggcagcagcctccgcctccgcaacggccttagcagcctcggcctcggccacctcggtacgcagcacagccacctcggaccgggctacagaaccccgccagtggctctggatcttggtggctgcgtctcgttgctgtcggagctgagctaactcgttgcgtgcctgtcggcctgccaatattcgtgccgcgaaatcttggatctcatgggctgcgtcaatctgcttcgtgtattcggcctgagcttggcgccgacgaaccacagcctgaagtaatatcgctgctgccttccggactgcgatatcagactgatagcgattccgttgggaacggcctcgcacaatcttttggataaccaccgcgcacgtctgctctctttgtagctgctgacggagagcctctaattgcttctgtgcctgccgtcgccggaattcagtctgaattcggatggcaattctctccgatgctgcaagcttctcgctgtaagcctcgcgcgcaatcacgccgcgcactcctgactggatttgcgtcgccatgtcatttttccgctgggtttccttacgatcctgatccttactgcggaaagctcgcgcgccttgagcataagccataccattgaacgttagaggtttcttgttctgcttggccagttcagctgtgagaagcaccaatgcggcgtcagttggggtgctttacaaacatgtacaggtgaagggaatacaacggttcgcaccagctttacgatccatctcggcgaacttctgagctgcagatctgacgtcgatcttggcttcgtcgacagaggccttgatctgctcaatgtctacttctatcggtggacaagaattcaatgtgagcttatgacctcgaacgcctgtcaacaaagtaaacgtaccgtcaatggattgcttccgggtcgactccatagactcgaccgactcaatcgacatcttacggttagactcccacgacgccttgcgtgcggcatcatccaacgccttccgctcgtcgcgcgctcggctttcggctgagatagcaagcagtaaccatcagcacattagggcctcacaaaccagaatagtccatgacaagatactcaccgagctgctcttggaaccttgcgagtgccttcaaggcctgagggctaggcttcttgatgcgtgaggctgggtctgtgaacgggtagcgcttggctaaatggcacaacgcacgaacagtaaggtaagcgacagaatcatcatagcactccaagcgcacaagacgaaccattcggggtcccggtgccgctcttaggcaccatgaagccgttcttcatgacatattcatgcgagacgtcgtgctggtcgtacttcaacagcgccgccttggccttttcctcggcctctttctccacctgcgcgatctccttcgcgtgcacgtacgcgtggtcgaagtcgggcgaggagaagttgttcttggcggacgcctccttagcgctctgctctttctgtcgctccagctcctgcagacgcttcttctcctcaagctgctcctcgaagtaggtcttcccgcccgcaaagttccgcagcgccttctgcgcgtcctgctccgacttcgtgacgttctcgcgctgcttgtggaagtggttgtacgagtggtcgtactccgtggagtaggacgtcgaggcgttgagggtcttggcgtcctgctccttcttgcgctcgagctcctcgaggcgccgctgctcctcgcgcttctcggcctcaaacgtcttaccgtcactcgtgaactgcgcgagcgactccttggccttctgctccgccgtgcggacgtactccatctgcttcaccgcgtggttgtacgcgcggtcgtgctccaagtcgtacgaagactgcttggccatggcgtcacgcgactcctgcgccgcgcggcgctcctgctcctcgcgcagcttgcgctcctgcacggcggcgtccacgagggactcggagctctttggggccgcggcgtacgaaggcttgtccgcgggcttgtcggcgcccggcagcttgatgggcgggggcgccgccgtgcggcgcttccaggccggcggctccgagttctgcaccgcgcccttgttgaacatggcgcgcaggttggccacgcggccgcgcgcctcggccagcgccttccgctcctctgtgggcgaacaagatacacattagcttaaggcaaggttgatcactagcagcagctgcgggacggacggggcacgcaccttcgttcataattgtactcttagtagcgggtgagtgtgagggccgctcactacgcgattggggtcctgctggagaggcaatcgaggagtgaggccgcggtcggaggggaggaggagcaggagggtccagctgacgcgggtcgcggctggtttcagaatcttgccggcgcgtgacgcagtggcgcacctgatggctccttggtgtcggcttggactcgactcggcttgggcgcgtaggtccacgaatgcctcgccttgtacgtggcgttcagaaacaatctcgacaatgctcgccacaatgcggcaacggagcgcgccggctttcacgcgtcccacggtcatctctcccttgccaccgtcctcgtcctagacctgcatgcgattatatctgtacccatacgagatgttgagccaagccgggtatgaacagacctgctatagttaatactcgaaaaagaaagtgcagtgtgacctgcgtagtcggtcgtgctagcgataagcaagtgctaccgaccggtgacgcatcgacccgcggcggtgattttttagtttgttggcgcttcgctcgctatgctcgctccgctattggagcagactgcctacgcttcgctacggcagtggcggacccgttccgctcgcctcgtcggctcgctgcactactctcaatgttaggttagtactacagaggccggggcgggtcctgcggccccgtatggtggggtcgccttcggcgacggagccgccttcgctgcgctcggcggctactcgtacttagtaggatccgtacttagtgaataagcgtgacgattttgtgacggacggacagcgcgtctttctgattgattctttagactagccgagcgccgccgctacgcggcggtagttatgaggttagttgcagtagagtgggccgcccacctccgcttcgctccggtgggctaattagttcggcgtgtttgtgtaaaacttgtcaaaaatacaaattcaaatgcaaaagaacacgtattattcaaagttatgtgcaggacgcccacctcgccgtgactacaccgtctcgaaaatttgtctgtacacgatgttcgctgtgtacgctccatcatcttcttctaactcgggatattcaatcaacgccttgaccttggatcgggcggtaacccgggagagcgcgacgtacagctggccgtgtgagaagcagggagacgcgaggtacaatccgaggttaaacaccgtttgtccttgggccttgttgatggtcatcgcgaacgcgggctgtaccgggaactgcttacgcctcaagcgaaacgggaagtctcgagcgttgtcgtcactgatgaatacaatcctgggaatcaacacgttttttccgcggcgctcccccgtcatgatcttcgcgtggatgacatgaggttttagcttcaccacccgcagtcgcgtgccgttgcataggcctaagtccgggttcagatttcgcatgagcatgattggtgctcccaccttaagcgtcagtcggtggggtgggataccgttaatgttcacagaattcaggacttcttggtcgaagaagttgctgtcttggtcgtcttgtactgagtcaatagagagataatcttgggcgtcaccctccaggcgcgcagacaccgcatcgttaatacgttgaaccatagcattagtcgtcgtcaagatagtacggcttgcgaagtagtaatcgccgggttgttgatatccgcatacatggcatcaaccatccgagttaggccaattgggatagcccctggcatgatctcagcgtcctcgtctggttcttcaggcgggttctcaaccaacatgtcccgcgggatcttcatatagtcgcctccaagggcagggttcacctcgtgtctgccttcaccaacttgtagaaggaactcggaaaaggctgccagctcagtcgctgtgcttgcgctgtgggccgaccgcactcgcatgttctcggtgaggtgggcttgttcgaagtgctgccataggctggacgacttcagacaggcgccgatcgttttggcaggcgtgcctctcactaccacgggcagaatttgccgaaaatcacctgacagtacgaacgttttcccgccaaacggttcttgatcgttgtccatgatatctcgtagactacggtcgacagcttcaaaggcatggcggtgggtcattggcgcctcgtcccagatgatcagactggcctcttgaattaacttccggagtttggactgcttgtaaagcgagcaaggcgagtattcattcagcttgagaggaatcttgaacgtagagtgcgcggtgcgcccacccaccagcagtaaagccgcaatcccgctagacgccaccgcaagtgcgacctttcccgaaaggcggacacttgcgaggatatgcttgagtagtgttgattttcccgtaccacctggtcagtcgatgaagaacagctttttgccaacttgaggatattccactgcatccataaccttttcgtagatggcgcgttgaccttcgttcaggtcaccgctacgctcgtgaattcggagtaacacatccggctcgtagcctgtccgttcccggcggataaggttgttttccagcagagattccagaaccaaaacccggtgctcgctcaactgcgggaggtcaaagtcatgcacggcatacccgcttatttgcaagtggtcgttaagtctcttgagcgtgtggaattggacagtatccgccttggtctgaccttcaagattcttgtacttcttctcgatatcactggaaagttcttcgtagaactgatcccacaacgcccgaacgtctgtaacatgggaatacaccagcaacgttgcgaacagctggcgcagttgcttcggcatcttaaacgttgcggcctccgacatgcatgcgacccactcttgatcgccgtccagaaagccggcgtgcttcgccgccaaatgatacgtgctgtaaaggactccattcacagtgcgggcatcctcgaaggaagtcggtcccctgtggtgacatagtaacacgcgcagatagaagcgctccatatctctgggtgaaacgtggatcaagcgtccaatcaccgcctggtagttagttctacgaacccactttttcgccttgtcatcccaggaaaattgcttcgggatatcttggtacaacatggtcttggcaatctggttgcttgggtcttcgctcgcacatagctcgaaaaagctcgtccacattgtacgtttccgccgatctgcgaccgctgctgggtcctcggtgggttggaaaatcaccgcctgaccatcttctaagtgaacggtaagcttcgtaacggagtgtgtcttgccttggatatcgtacgccaaaagccgcatacatgcctctaccggtgatatgtatctggcgttcaaaaaccgtaggatctcgttcggcttcacacgggggctgttggggtctcgcacggcttcaatagtaatcacagctctgtcggaccctttgtatacgtacttgtacagatacttcacagccgtaattgccgtacacacctccacgttgatgtggcaattgtacttttgcgaaaggtacgggttgtacggaaccacccactggttcactgtctcgttgtcgtacgtcttgcctttgtacgttagagcccccgtttcacgccggcgccgcctgtagacagggtacccgtcttggtttgctcgagtcacttctaccaacggcttcggataccccttactgcacttcccgtccgtcatgcttgggctcgtagggttcgcagctccgcacggaccatgcatcatgcaactcatgatcgtttcgtacagagcaggattaacgtccttgtcgggcacctccgcagacaccaacttgtcaataatctcgcgagtccgaggcttgtctccatcctccagaatcgtgagaatgtgggcgtgtggaaggccgcgcttctggaactccactacgtacattcgtgcctgtaggcggccgattataccttcgtccaaatccgctaaaagggttttgagcttttgttgccagacccgggcaacaatatccgggcggtcttgagcagtttgaccctcagggagtttttccaggatctcttcccacttggtattgcacgtcttggtaaggaacacgtcagatttcccgtactcgcgaactatagccattgagtcttggtacgccttgtacatgtagcgcgggccaccgacatgcgagtctgggaggataacccgtttaccgatttggcccagaaagtgttcatcttggtcgctgcgtctccggtctgggtgtaccaactcgccggtatcccgattgaattcagacacaatagcttctccttcacctagcgtcacagccgtctcattgagcaacgcgtcttgaacgccgtgatactggtccgcacggatctccttctgatgcatagccacccatcgcaactgctcttgttcacacttagctcgctggtcgaccacccactgctggaagagccgacctccttggaatagagccgattgatcgcaatccttctggaacagtcgataagcggtatgctcgcgcagcgccatcttcgttttcttcctgttctttgctccgtccgcgtacgtgtttgtgtacgtccatccgaggtcgccgtatggaaacagcaggggatattgaagtggatcatacttctcgtcggtctcgaataggcgcaacagttgctggtctttagcgtagtgaaccaggtcgcgagacttgggaatgttaccatccgtaacgacaacggcgccgacttccgaaaccgttggcaagttgtgcgtccctggatgggaaggcttggcctgcagcttgtacttaatgtccatgatggggatacctttggccaaatcctcccgcaacttctctccaaactttaggaattgctgcgcgaacggattgcaccgctccatcatatcctcgatgtccttcaaggcgacgttgtccagatcggcgtaaatgcttttgcgtcgcttggcgcgctcttgcatcacgggatccacgatgtagatctgagcgaactttggttccgtcctctcacccgttgcgcggtccacgtaaggcagcatagatcccaagtaatgccccattgcgccttggatacggtacgtgtacacgccgttttgtcccgcgacctcctcgtcttgagctacccctcgaaatcgtctgtcgctggaggaagcaccgatggacgtaaaagcaaacgcctggttgtacgcccggatattgcggcggaacttgtcgtcccggtaccactccaagaggcgcggaggtgctgcacgaagcggaggtagtctcactctacccctcatgcagcaaatgaactcggactcgttgggccatttcaagcgtgacacagccggcacatcgtcgttggaggtaatttgtggcgtccgttgacgatgtgttgtcccctaacgttggcaacccggaagtcttcatggttggcgtgcgcgtggcgatgcttaacagccctgcgtcgaatgcggttctgttcgcgctgagcctcgagttattgctccgttagcgctgcacgtctgtccgcttgccgttctcgatcgcttgcttgcgttgcgatgcgttcttcttccgtctgtgatgcgcgacgcactgcttcgcgctcccggttaagctgtcgagccacctcacgtgcatccgcagattgcccttgtcggcgtgctcgcagggaagagcgattgcgttcgcgcgcttcattgcggtccacagggttctgacgggcacgacttgcctgcttacgaatacggtcagcctctcgtgctgcagctcgttgagaatccgtcttcttagccctcgaagctcgagtgcgctctcggtgttttgccttcgttcgctctttctgcgatgcggtcatgttagctctacggatccgttgacgctctgccttacgagctcgttcggccgccgctctgtcggccgagaagggggtcgatgctgctgcctgtgcagcctctgcctccgcaatgcgaagtccctctgtatacgcagccgcataccgacgctggtgctccagtgggtcatcgtcctccgtcttgccttcctgttccaccgtagactgttcaacaaccacggcgacctgagacaccggtgctggggcagcgctgtcgtccccggcaatgttgagagcttctaagtccttttccaagccgcgtttaactcgagatcgtgttttctggcgttttcgctttacttcctcttcctcaggctccttaggtgtcttgttcacatgcgcgttatccttcagggctacttcgacctcagcccgcgtgcgctggcgtttggggcggcgggccatggcctactcactgcgaacacgaaacatagtaacgtgacgcgttagacattaagtctaagtacaccgcatataccagtagtcttccatgcagcttggtttggttggacatctgcgtactgcccgggtggtgcggctcccatcgaagtttactatctcatggaacgaagtaaccgacacgaaacaccgaagtgaaatcgctcgcaaacgtgcagtcggcaagtcagggttgagcgcccgggcagtactgagggtcttcgtgcgatatccttttgcgcattcgtgagaatggcttggtcgcatgggccaaaggacccattacggccagctcaaccggttcgcgttcgggtttgttgtcaatagaccgttgccaatataaattaccaaaatgtatcaaattttgataatttacgttacgctactcgccagagtgggcggtgggtttaaatactctgtaagggtccaaaatgtgtatgactataaatagtcctacccatatcagaccaatattttttaaaaccccctaagcacggcttccgcctagcgaggcaaccccccgctaggatgatacttccccctaagcagccccaggagcctcggactatctgtgcgtggtagtggtggtgccttgagtggctaactaacatacatacacgcagcgtacctcgtcggcatcgtggcgcgcgcgaggcccaaattcaaactggggcaaaactgcattcagcctctagtgtggcccacattaataattcttttaaatattaaattaaattggtgacaccttaaatacgttaaaagagcaaaaattatatttattgagagccgtacacgtacgctagccaacgccgcaaggttacccaagcagtagggtcagtgaaggtgtcccaggcgaccagcgcacagcagcacggtcgcccgggggtgccgcgggtgccgccttcgctgcgctcggcagcttgtaatggggccgcttcggcgtccaaggctgtctatgtacgattatgtggaccacctttaaagtggacaaaagcttcacacggactttcacacggacagatctctctgttagatgttgtagactagccgagcgccgccgctacgcggcggatagaatttatactctaattagctgttttgcacccgttccgctcgcctcgtcgactcgctgcactcctcgctacgttgggataataaatacagaggccggggcgggtcctacggccccgcaatatcgtattggggggtcgccttcgacgacggggccgccgtcgctttgctcgacaacctaagtacgattatgtggaccacctttaaagtggacagggtgtgacggactgacacgcagacggacagatctctctcttagttgttgtagactagccgagcgccgccgctacgcggcggtagttatgtggttacttgcagtagatagggccgcccacctccgcttcgctccggtgggcttttatccagttcaaatgttattgatttcgattgtgtacatgtaaaattgtctataggtttgaagtactatcagtagagtgacgtggctggtaatagctattccaacgtcagtgcactatgagtatatgcatgttgcagggtaaaacattatctattgtacggtcctgtgctcccgtcgcaactatttaacccgaattacaaagtatccgcacagtacatatctcacaatctgcgtttactgtgagtttagtagaaataaacatgagcaatatgccatggtagggtagatcgatctggtgttggtatcttatgtgtgctcacataagtctatgtcgtacttgttgtttattcagtttatcatcccaccgtagctctctcgtaggctataataccttcattctacattggactataagccccagcaacaatcaaagtatgggtttcgctcttcctgtacttagcattacattaagtgcttgtgatcttatataaataccgagtgtacatcatcgttttagtatttcgtatgttccgccaaaacgcagctgcgggctgcgctaactactgcgtggtctacttcaaaactcgttgttttagacgtggtattattctactacgcggcggacattaccattttagtgtaccacctgcattatagtaggtaagatatagagagttcgcactcgtaactttatagttataaagtcacgtttgccctttgttaccctatcgttaccagaatgatacatcaagtatctttttactttggtcatagtagaagcaagataactgaaacagcaattttctgagccacggcagtttcctcaccgtttatgaccaatcatacagctaagagggataggtaaaaccccacgctattgtgtcttctgtagtatatctatcaacactattgtgtcccaggggcacggacgcgatcatcgagcacaacgccagcggcagccgcacactggtcgccgccggtagtagcggcagaagcgccaccagcgacatcgacagcagggtctcggacgcgatggaggtgaccgtggccttggaggacgcggtcaggggcgtctccgccgacatggacacggccacggacgcgatggtggcgggggactcgggcagcaagcataacggcggccgcagcgccgtgtgtgcgccggcaacatcatgaccacggaagctttgggcgtgaccgttgtcgtgctggaggtggtcgtgggtgcctccaccggcacggacgttggcaagaacgtgaccggtgaccagacagcgtccgcaaatgcatcgacagtgcggaaggagaccgttgtagaggtgccagcagtaccgtcagcggcatcaacagcatgacgtcctttgtagagatcgtgtccgtactggaggtgatcggtggcaactccgtcagcatgtagtcggacgcaatggcagcgggcgactcgggcagcgagggcagcggccgtggcagcgccgtcagcagcatgacctcagacgtggtggtggcgaacgtggccgtgcaggatgtggtctgaggcgtcttcgctgacatatacacagttgggagttattgttatgcttggaggcgggtggaatttctaatagcatcctgtcggattatacgcagtggagtgtggttagcttgccgctatggtgcaccagtggtaaagcagatgttgtcagccacgagctaaattcgcatttacggcatcaagactagcgggggcagatggaataggtgtgacttagtgcagtgaagtataaatggttagttgactttgactatcttgaaaaaatgatgtgaggttacgccttggtggctgcgttagccttcttttggtcttggctggccttcagaaatggacggttagctacataaattggagaggttcgtcgcaagttgccgtcgacagtgtacacttgcttcggcaagtaaaacaaatggtatttctgccagcaagtccaagtttgctgttggcacagatgctgcttcgttgggtcaacagggtatgtgcgcttgcacaacgcaactcgatgggtcccgcagtagtcggttttctcggtaggatctctgcccttgaacttgcacacagtgcatttccgcattgagcgactccttccctgaagcacctccgaggacgctcttgcaacacacgtttgtgcgtgatcgcccgaagactcggatacatctgccgacgccgcggtttgggtcgtcgtcggcattgttgtcgttgtcggcttcgcagcatacaccattccatgttccctatccagagatttcttccagtccccattgaacagttctcgaaccagtgatgccacaaatgcgcgatgactatcgcgggctcttgaccttgtttgggctgtacctcccgtcgaacgagactcctcgctctcaccacgcgccaaactatcgcaaatgtaggcattgcatctggctatatcaagcatgaccatcgctagttgtttatgccacttctgaaatgagtggccatcggctagagaaaatcgtgcacgcagttggtcgagccgatcaacaccttgcatcgctgaattatactccccgacgcaagtaggaacagtgaaagccacactcgattcttttatacgacgatgcacagttgatgtggtcgaagcatcggcattagacacgacattgacaattgagccatccacccaactagctgcgacaatatgcttctctaagcatacaccttgcttcatgtagcctcgcggcttcgcgtcctccttacgaatcatcgtaaaatgagggaaatgcttgctagatgtgcgtacagtgccacgtccatagagaccaatcgatcgtaaagtctccaacagcaaacaggaagtgtagaagttgttcgtgtttacaatgcgactgaatcctttcaaagatgaagtaaccttcatgacgtgagagcggatttcagacgacttcgcggttagatcagcgaatttctgcagttctgagcgtgaaattacaccgtccagccgatcatcaagttcactggagcagtgcaacttgaaactcaccgcgtaccacgaggtagaacagcaacacacgtataacttgaaaagatactttccggtgggtttttgtgggttgaagactataatgtggcgggcgtactgggatccgcaggcaattgtggcctcatcaacagccacgtttcgaccgacttcaacatggcgcaggcatcgcgatttcagaatgctcatgagtggtcgtattctagctacaggatcgcgcttgatgtcggaggtagacaccttggaacgaaaactcaaattcttacgaatgtacaggagtcttctccatgtcataattgactccaaactagtagtacgcgctccaggaaaaatagttgcttcctcgtcgtccacccagtaatttctcatctcacccttgtcgaacagagtcatgtaccagaggatcccaaggaatttcatcagttcctctaaacgtacaggagttgccgatgggctgccagatgcgtctgcatactcgttggtaaagacgaccacttggatccagaacgacaacggaataaacgcgaagaacgatgaggttgctgaatgcccaaacaacccatgactttccgggcgtagtctggtagttgaagacccatacggatgtgtaaatagccctgacggttggccaagcgatgctgtgggtgaaaatgtcattgatgctatcgcttcgacttcaccagggcacaaaggacgctgcaattctttccgcccgcgaaacgcaaaccactcacgataaccacgctcgtccatctcctcaaattcatctgtcagtgcaggaatgtttgatagtttggggaccatgttgcacagggacgtccaagactctccaaattgaagtttatctttttccatgttggcaaactggcgaataccacgggtgatgatggcttcggaaacatggtgaacgtgatcttttttttgaaaagcagtacacgtccgttgaacctgaaatttggcgtgaggaacgctaacattgtcagcatttttttcgcttgccaggctgtagcgagtcaccacaccaatcaaaaatgctgcgccaacgtcgcgatacaaactgagcagcattcactcctcatcagtcggtgaaaatgctacgctagcatcaacacatttttcggcagccgcatgtgctcggcgaatcaactcttctttcattgccacagccttgggtttattggccttggtaggtgccttcttgcttttcgttttccgttgtgcagcttgtttttcgcttcggggtgcctttggagctgattgttcggcaggaccgcgcttttttcgcttaggttttgctgcccccgagcaatttgtagcaggatgtgtggcggcgttggtctctacaggttccgacggagccacacttggcgtcaaaacactcgcggggaggtcaagtagggcattgggtcgtacatcacttctcccttgctccaccaagttcatttttgtagcgtttgtgtagcaaagcgtgctgcaatagctgctatcaccgaaatccttggcgaatccaccattagggtctgggatattcaacgaaacgcagacatcatgagagcagaagtgatggagaatttttttgcaccaggtacaactgcgcttggttgaacactccatattgcagactgcacattgcgcacatataccagacgatgcggtgggtgcgtggtgatctagctggagtaaatggtctcgcgtagctgctgcatgtacgggtacgacgcgcgctgatgttggcggtgtagatacagcagaggcagcaccatcaaacaccgattcgtgacagcttactcccggaagcgcggctttctcacaatcaacgtcgcttgcactcgctccaggaactccaccgctactgccacgtacatcatctgccgcgttgagaccaacatcgccagccccacatggattaacgttgttttggtcgacatcaatttcgtcatcgggtcgcttggacagggcaccatccgtattaccatcctccgctatcaatgtcagccgatagtgctccagaagcgctcgttcacctagaaaataatagataccctctgttccattcgagtcaccaccgggagggatatagcggtacagatcactcaagcttcgccctgttggacgcttcgaactccaaccagccgcacttagaactcgccaaacagatccaaacatcgcacggtcatccgcgaggtctgtatgccggtggacacgcgtcaatatgataccttgctcgagcgctaggtaagcaacggatcgtacctagaccggtgggagctgaaggtgagatactacccgagcgtcgtgattgttgtcgcttagctgtgggctcgcaggtgctcgaccgctgcttccgctttcgaggcattgggtatgtggtggtggacgagctcagctagcgtaccagtcgctccttcacggcaaagatctctaactggtttgcatgcatcggtctcgcttgaaccattggaccgaatatattgttatttgtatggccatgttcggagtgttcaaagggaccgaacgtactaggctttgtatggggtggttcgactcatcgttgtatgtgatgttagtatggtggagtttgaacccaccggtgcaggttcaatgcccgccatgcggaatgcagcgtagctgtgctgacaaggtaccgtgcaaaatgcatcggatatcgagtgcgggatgaatacagtgtaattacacagagtcatgaatagtacgagtactcaaagcgttcaacggtaacatacggtacttagatttactccaggcatattgctaccaaatgtaagtgctgtagcggcttcggcatcgtctccagagttacgttgacccatgcaagccccatagtgacggtccgaactacggtacacggcgacagtggtgacgcccatcgtagatacactgctgccaagtgccaatgctgcctgcgtgtccctgtcgctgggcaaattgggcgcttgcgacgtcgtcgtcttggcgacttcaggctccatcttgacccccgatgggactcgaacgctccattgctagcagcagcctctcttgatctttgtcgccggtggcaccccgctccctcctgaggtatctacgtgcggttatccgtcgatgaggatcgctggaagcgaaaaaggacgggagaacgccgtccacctgcaggtctagtgggcagtcgtccagtgccgcctccgacgctccatctcggggtcctgtagcggaatctcggcgtctcgcagctgaacgtggttgacagccacacccggcggcaatgccgtgaggagagttgggggctacgggaccaacgacaccatcccagcgccagttctagtagcactgcgttatcgacaacaaatgcgctgttgcggcggttgtgcgggacgtggtcgtcgggtgggtacacgacggacagcgagtccaacttcatgcccggtgcgtcccgaggtcagcgcgtctagtagcacaggcggtcagcagcagcagcagatgcgtcgacgcacaggcgctgagcgtgtgacgactccaacgacgctggacttggtgagtgaggggcaaactggcaggctggacttgaccgcagcgtgcacagtatcacgggcagccacgcgccgtaaacgatgggtacgaccagcacatgtgtaccaccgtcgtccgaggcgtggaaaccggaagaacggagcgtgggcagccagggacacttgggatcgagcttgcaaaatcggaaatgagctccgatgcgagaaggtcattttgattcggagcaagccgaacaagccgaccaaacaacagtcgaccaaacaacagtggatcgatttgaactaattccgccaatcacacttcttgttgaactttggcagccaatcactgtcatcgatttttcggagacaggttttgattggtcaaagcgaagacatgggaaaaaatgtcagcgcgggaaagcttgaaaagatcaaccaaagcaaaatgggcaccaaaaaggcgagcctttacatgttgtgtaaaccacttcaaataccgatagcctatttatgtaacattatgtatagcgaccgctctacccgttctccctcgccgaaatgccctaccatcggcattcccccaaccatggtcttggtggacctggtcggaagcgtctccgccgtcggcgacacggatgcaatggtggcgggcgactcgggcagcaagcacaacggcggccgcaacgccgtgtgtgccgtcaacagcatggtctcggaggcttccgcggcgaccgtggccgtgttggacgtgagtggccgtgttggacgtgatcgagggcgtcaccgctggcatggtcacgaacgcgacggtgggattcggcgcggttgatgaggctaataggggtgccttcgtgttggctggacagcgccacgagagcgtttatagtagcggcatcgagagccgggctgagttgccttgctggcggtaggagcgtcttcaacctggtgttgaatacattgatggggatgggacctttgtgaaaggtcggtaggttatcaggcgaagaagtatgagaccaaatatcttatggtatgtatggcattaaaggtttctagatctcgtggcaacccgatggcagacttctcggacgaagaggacttgctgctttatcggctggcaaaggatcaggttgatgcaggccgccgaatttactggcggactgtctggttggggatggcatactgcgggaagacacagcgacagctgcagattcgtctaaagacgctgaagaggacacacggcgtgagcttagattctttcccaaggagatttcgggatcaaaaatcggcacgaacgcgcttagttggtggccacaaggtgagcgctcccgatctgggtcaagtttgtttgcctcggccttgcgtcaacccgtccatgcgccggattgtcatgctggtgagatttcgccaactggggtttcagcagtcattccaacgcttacaatcgccgacacttttgttgactttggatctgggatcggcaacgtggttgcacaagtggcattggagacttgtgttgggagatgcatcgggattgagttccaggacaacttggcaaacatgtccaaactgctcattcgtggcgcacgcgtggatttcccgaatttatccaaggtcacgattcacgaggccgacctcagagcgatgagcccagccgtacgcgaggatattgacgggtgcagtgttttatttgcgaacaatatcgttttcgagcctacaagttttgcggcgctggaggactttgcatcttcggcagcaggtttggttcacgtcgttatcatggcaacaatttgcggccggcaccgcccaacctgcccgcgcaaattccgctctgtctagacgctccgacagcgtatcgacgttcaagtgtcttggtcttcccagcttcatcatgcatactggtacaccagggttgtagagccctacatctaagtacctcacgcagaatggaaagggacattcaatatacttcgtttgtcatcttgttcatccaattgttcattacctgtcgagccaataacatatatcagccattgtacacatctacatcaacgtcttgcacggacatcgtagctctgaccgcatccaccaaggtcacggtcacctccatcgcgcctgaaaacctgctgtcaatgtcgctggcggcgctgctgccgctactaccggcggcaacctgcgtgcggactgccgctgtcgttgcgctcgctgcccgagccgaatgccaccgtcgcgttcgtgaccatgccagcggagacgcccccgatcacgtccaaaacggccacggtcgcgcgacagcctcgccccagccgaatcccaccgtcgcgttcgtgaccatgccagcggtgacgccctcgatcacgtccaacacggccactcacgtccaacacggccacggtcgccgcggaagcctccgagaccatgctgttgacggcacacacggcgttgcggccgccgttgtgcttgctgcccgagtcgcccgccaccattgcatccgtgtcgccgacggcggagacgcttccgaccaggtccaccaagaccatggttgggggaatgccgatggtagggcatttcggcgagggagaacgggtagagcggtcgctatacataatgttacataaataggctatcggtatttgaagtggtttacacaacatgtaaaggctcgcctttttggtgcccattttgctttggttgatcttttcaagctttcccgcgctgacattttttcccatgtcttcgctttgaccaatcaaaacctgtctccgaaaaatcgatgacagtgattggctgccaaagttcaacaagaagtgtgattggcggaattagttcaaatcgatccactgttgtttggtcgactgttgtttggtcggcttgttcggcttgctccgaatcaaaatgaccttctcgcatcggagctcatttccgattttgcaagctcgatcccaagtgtccctggctgcccacgctccgttcttccggtttccacgcctcggacgacggtggtacacatgtgctggtcgtacccatcgtttacggcgcgtggctgcccgtgatactgtgcacgctgcggtcaagtccagcctgccagtttgcccctcactcaccaagtccagcgtcgttggagtcgtcacacgctcagcgcctgtgcgtcgacgcatctgctgctgctgctgaccgcctgtgctactagacgcgctgacctcgggacgcaccgggcatgaagttggactcgctgtccgtcgtgtacccacccgacgaccacgtcccgcacaaccgccgcaacagcgcatttgttgtcgataacgcagtgctactagaactggcgctgggatggtgtcgttggtcccgtagcccccaactctcctcacggcattgccgccgggtgtggctgtcaaccacgttcagctgcgagacgccgagattccgctacaggaccccgagatggagcgtcggaggcggcactggacgactgcccactagacctgcaggtggacggcgttctcccgtcctttttcgcttccagcgatcctcatcgacggataaccgcacgtagatacctcaggagggagcggggtgccaccggcgacaaagatcaagagaggctgctgctagcaatggagcgttcgagtcccatcgggggtcaagatggagcctgaagtcgccaagacgacgacgtcgcaagcgcccaatttgcccagcgacagggacacgcaggcagcattggcacttggcagcagtgtatctacgatgggcgtcaccactgtcgccgtgtaccgtagttcggaccgtcactatggggcttgcatgggtcaacgtaactctggagacgatgccgaagccgctacagcacttacatttggtagcaatatgcctggagtaaatctaagtaccgtatgttaccgttgaacgctttgagtactcgtactattcatgactctgtgtaattacactgtattcatcccgcactcgatatccgatgcattttgcacggtaccttgtcagcacagctacgctgcattccgcatggcgggcattgaacctgcaccggtgggttcaaactccaccatactaacatcacatacaacgatgagtcgaaccaccccatacaaagcctagtacgttcggtccctttgaacactccgaacatggccatacaaataacaatatatttggtccaacatatccacccaacaacgctgatctctagtacttcatcattctagattctgcgctcaagtggaaagatggttgatcgcaggaaggtcgcggataaagtagaggtaagtgttttggctatttcggcatcgtgttgttatgctagtgctaatacgaacggctatgtatgggtagttgtcaggaccaactaagacgcatgcaagcgatggaaggcgaatttacggatcgtccaagacgcttgaaatggtagtgatgacattgtttcggccgtactgatgctcatcgcatatatagtctttggctttgtgtagcgccggtgagcaactggagttcgacaatctgtatccagtatttgtgaccccttctgggcgagagcgggtaagttagtgtagctacgcaataacgtttggctaaagctaatcagtgcctacctgtagagaaccgaagcgagatgtggcacgtcgatcgacatagacgacttcataattgcactgcccgtgaaagagatgaacgacctctacgtggcgatttgtcgcggtgaagatgatcgtgcgcacaactttatctggatgatgcgttggctggagacgtgcatggagctgtctgaggtaagccaaaatgttgtatcgtggctggttacgggtaatgatatctatgtttgtattcgatatgaaaatgtagatcacgcgaccgcaaattcgggcacgtctaaaatgtataaactccaacttgttgcggtatcgtgaggagcaagacgaacatatcgagcgctttatcgcgatggaggcggacccttccacgccacacgacaccctcatgaaccattataaggaaggccttgacttgcagaaacgctacaacgtagttgccgatctagccacagcgatggacagagtcgatatacaggcggaccaactcaaggaccaagctcgctggacatgctcttgcgagaagtgcgcatactaccgctcgccccaatggcttcaagagcaacctctcggcttggcaccacaagctctaaggccgcgctggttttggcctccccgctatcatgggtgatatccagttgattcgcggagcaggacgctccaaggcgaatacacgttactgaatttactatgtcctccccctagtaacagagcaatatgcaatttagttgaatgtaatctctcaagtaatgttacttatagagtgaactgatcattctaacgaaacccaaagctgtctgaatacggtgatcctttgcgccagcacgcatacccataccggcaagtccctgcccacatctaccaaggccacggtcacctccatcgtgtacgagacccttctgtcgatgtcgctggcgacgccgctgccgctactaccggcggcaacctgcgtgcggactgccgctgtcgttgcgctcgctgcccgagccgaatgccaccgtcgcgttcgtgaccatgccagcggagacgcccccgatcacgtccaaaacgtccacggccgccgcggaagcctccgagaccatgctgttgacggtgctgacggcgctgccgtagccattgcgcccgctgcccgagacgcccgcagtcatcgcgtgcttgtcgccgccggcggagacgctccggccaggcccaggacagccgccatagtcgccaccgtcgcgtcggagaccacggtgccgccgcttcacaactaggaaaagccccacataatccacaagagggcgctgtgatccacggtactgctcttactaaaattttgttagggtgctgttctcacggtactgcttccactgatactttgtcgattcgcagcgaatcacagagaagcagtaaaatgatgcctcatgtacctttttgatcgaaaggtcgcttcaaacctcccatcacgtatacttttgatcagttggcctcacaaacctaatacagcaaaatgatacctcatgcatcattttaccccgttttacttaaagtttgtatggtgtcccttcaaacagaaatgtatggcgttaacgatagggttaattcggtttcctgcgtgtatatccgccccataacacggttagatgaggaatcccagcgtaagctatagtaaaaggcttccactcagtgaatattatctactaccccactaacgcattctcctaacgctacacattgtaccttaaagatatacgaaacgcgtttaagcaagtgtagctaaatatccccccaagatgaacgcagagcgccgctgtagctataatacttaagtatgtacattcctaaataattacagtaaaaaatatgctatgcgtgtcagcgaacgccttcctcatatgtacgcgcactgctgtcgcttactatgcgcttctatcctttactatgcgcttctatcgcttactctccgccgctatcgctaacttatgcgctactatcgctcacccaattatcgtagcaagtgtttatatgaagcaaacctcgctacagcgctaatataccaagtagtagggtgcccgactccagcgatagctactactacgcggtgggcccattttaattaatagcaggtgttccaaaaagtattatattaggccaagcgtcaccgcggggtgacgtaatcgcccccgttccgctcgcctcgtcggctcgatgcactactcgccgtgttattagtacatagttgtagggcgggcgctgcggcccgctagaacgcacgcgtgtgccgccttcgctgcgctcggcagcttgtgatggggccgccttcggcgtccaaagctgcctatgtacgattatgtggaccacctttaaagtggacagggtgtgacggactgacacgcagacggatagatctctctcttagttgttgtagactagccgagcgccgccgctacgcggcggtagttatgtggttagttgcagtagatagggctgcccacctccccttcgctccggtgggcttttatccagttcaaatgatatttatttccgattgtgtgcgtgtaaaaatgcttttatgcttagtgtagtcgtggatggtactagtatcagccaaaataactgttcccatgccagcgttactatgagtagatggatgttgcagggtaaaatattctctattgtacgaccctatcttttacgggaaagccgtgtccaactcgtccaactcgtcgcaactatttaacccgaactacaaagtattcgcacggttcacatctaacaatccgtgtttactgtgaatgtagtagaaataaacatgagcaataatcatggcagggtagatcgatctggtgttgctatcgttaacgtgctcacgtatatgtacatatttgttgctcagtttaccatcgtaccatagttctctgtcattcagtttgtatacatttacattttgtattgggctataagcccagcgacaatcaaagtgttgacttcgcttttccccgacttaacatataataactattcgtgttcttatttaaaatatcatgctttatcgtttcagcattgtgtatgatccgtcaaatgtagctgcgggctaactattacgtggtctgcttcaaaagtcatacatttagacgtggctatccgtttattctcgtagatacatgtattctgacattcactgagcggaagttttttatcatagtttacgctgagtttcattcaataaccatgctattaggcgggtatacatgtaggaaacggaattagtatagtgtaaacgtgaagtttatagttacgcggtgcaaggttgttacttttaatatcatagttactgtaaatgctaaaatgctaatgttcgctgcatagcagaaccccactaacgcattatcctaccgctgcacactgtactttagtaaatacgaaacgcgcttaagcaaatattcccccacgatgaacgcagagtgccgctgtagccataatatatccaccgctaaagtattacagtaaaagtacactgcgcatgttagtaataaatctccttccgctacatgtatcgcttactgcacacggctatgaactacaataaaacctccactccaatgcatgtctaggcatctactatccccagaacccattatcttaccgctactcagcaccgctgcagctataatgtatccgtccctaaagtattacacaaaaactaacctgaaactattaatcaatcgtcttcagctactgtacctctcgctacatgtgctcgcactgctatcgcttattacgtcggtgctatcgccttctatgcgcttctatcgcttactatacgctcctatcatttactatcatttactgtgcgctgctatcgcaaagtatccgttgcaatcgttttctacgtgctgctatcgctaactactagccgagcgccgccgctacgcggcggcgatttttagttagttggcgcttcactcgctatgctcgctccactattggagcaggctgccgacgcttcgctacggcagtggcagacccgttccgctcgcctcgtcggctcgctgcactactctcaatgtttagttactactacagaggttgggcgggccctacggtcccacaatatcgtatgagggggtcgccttcgctgcgctcggcagcaatttcagccaataggaattcacgtgatctacacacggacagcgcgtcgttctgattgattcttagaatacgttcatatcgctgactacgcgctggtacagctaactatgcgctgctatggcttacaatgtgcttatgtttaaccaagttcgctgaattaaaattatactatgtagtagggcaagcccagctatcgctgccactatccactactcgcagtactattatatatttaagaggactctgctatcgctgctactacgcggtgaacccattttaattaatagcagctgttccgataagtattatattaggccaagcgtcacggcggggatgacgtaatcgcccccgttccgctcgcctcgtcggctcgctgcactactcgccgtgttattagtacatagttgtagggcggccctgcggcccgctagaacgcacgcgggtgccgccttcgctgcgctcggcagcaaatcggaattagtggggtggagttttagccaataggaattcacgtgatctacggacaacgaaggattgatgtttaggactagccgagcgccgccgctacgcggcggtagttttgtggttagttgtagtataaagggccgcccacctccgcctcgctccggtgggcatttatccacttccaaaggtttgaatttcgtgtgtaggtaaaaaaaggttgaaagtactatcagtagagtgacgtttctggtatcagcttcgtaaatattccaccgttagacctacatcagggtgtctataggtagttgcatgttgcaaggttaaacattctattttgtacggtactctgttgtaaaccgggtccacatacacacaattagttaatacgactacaaagtcgccattgtagtaaacgtcgttgaaataagcattgacatgagctactacttgctgtggcggggtagatgttgctatggacggtgtggtcagtaaagtctgtatacgtgttgtttaatcacattatcgcactaccatagtttctgttatttggttcgtaggctatgccattaatagtgtacttcctaacgctaagatgttagttgctatacatgttagctaactgttagtgtctagtattttgagctaacatgttagtagcgttagagcacaaagataggtcaccttgagtaaatgtaggtggaggagaaaagctctgtttatataaacgcttgtaagctattctaataatatattctgacctgctatcgcattctttggtcatagtgtagcttgggctaggttgcagaccatacttgaagtttaaaccaggcatagaaaccatacttgaagtccaaactagacttagaggacataatttcgtttaactcttagctttatttagtcattacgcggtgcgtgtgcaccaagaatgtatcataaaccaatcttatggatttaatatgtagagatgtgccaagaaaactagcacgatacatatttaaagcaatggtccaagttgaagttgtatcacaagatgggaccctacgataagatttttctatctttaatttctcttcagtcattgatacttataggttgcgcttcaatatatcccttcacccctttcctatctagccttattatggagttgatcgctcccaatcggttgccagtcttcgatttcctctccagtctcgatggcgtctagtctcaacgacaagctcaagtacaagcgctcggctcgagatcctacaaagttcgacatcaacgtgttcctctccagactcgacgataacaacgggaagtgcagaggttgcagcaagaaagtaccttggagccgagagcgcgtctcctcgcacaagagagcaacctgtacagctgcgtcggaaagcgaaaatgattttttcaagtctatcctgaagcagaaacgcgaaaggacggaggtcagccgcatcgtcgtaatcgacagccccaagcagcacaatatcgttagcgtccaagccccaccccactcacctgctaaacgcccaaaacaacggtcggtcgcgaaggcagtcgtaacgacatgggtggattcgctcacggatgctgaacgcgcccatatcacagaggccttggcgatctttgtgttcaggactggtattccgtttcgagttgttgaatcagctgcgatgaaggaactactacaggcgttgcgtcctacatacgtgccctttgcaccaagcgcgaaaacgttatcgggctgactcctcaccaagcggtatgggtatctcttcagcaaagagtttttcctagtaactggtgctacaacgttcacgatttcaagttatggatggtctggtctcaacggcgaccacgttgtgctgattcctggcaagaaaccatttctcttctgaaccaagtcaactgtcggcatatcgcagacgtcggaggtcattgcagcagagattctacaagttgtctacgagctgggcgttgagaagtgcgtcggcatagtgacggacaacgccccctcaatgcgcggcgcgtggagcattattatgcagaagcacccccacatattcgcgaatggatgtgctgctcatgtgatgaaccttctgatcaaggacatttgcaacatcgctgtgttctcggacatcctgaagaaggctacgacggtggtcagctttatcaaggagcatggatttgttgtacaaccgcttggcctttgaaaagttggagcgtgtagccttcatttacatcaactcatgcctgcttgatgacgtcgactgccgcgactatctcgccgaggacgtggatgaggacatcgattccgacagcgacgaagagagtggtgaagaaaaggaagacgagggcgaagtgatagtgatcacctagtgctagagtggcagctcgatctttacactttttttagtaaacctaaatacaaataccacatgcataaatgactatacgtttattaaaacagcaagctataaaaaatgatccataataaattatccttggtatgtgatcgtgatggaacaagtttcaaatagtctaatttcaatctgtcgatactgtaattacctcgatatataccttagatcagcaaattgtacatgctcaagttgaatttgttagcttaagatacgattttgatacatatatattttcatatctgtacggcgatcttgggcataattagtatctgccgggacatccttcgcgttaaatacagtcaattatttctggcagcttttgagctcattcttatactgtgtatttttaaggtagagttgttactgtgtgcttttgaacatgccccactcttcttttcgcgcacaagaacgcgtggctcgacccaacaagcgccaacggcaagctcggctgcgggcacgacacgcgcgcaacggaagatggaagcgcagtcaaacgccccttacgacggcacatcaatccacgccaccgtcgactccccctcgacccaacccaccgtcaactccccctcaggtgagtttcgatttaggcgatgatgtatcggccgactcgccatcgacacctgcccccccccccccccctgagagtccgtcgcaagttcttaccggcctagttagtgaatatgcagacctatcaaatgcaacatcaagcgaggccgactccgaccccgaaatcccagctgaaggaccggggatttaccatgcggaacggatttacgaccggcgaactgtgaactaccacccaatctacctagtaaaatgggtaggttgggaggaactcacatgggagtcgcctcaccacttgccagcagagctgatagtggattttgaaagagatgaagtaaatggtgcctggcctaattatatcagaatccctggaggttggtggcgcggaaggtcgacgtggaggctagaggaggacccgtagaaactatacttttgattagacttcgcagcagaatcgcttaataaatacattggcaaactatacagtacagctatacagtactaacatgtatagtttacaactaacggttagttagtgtctagtaaaattagctaacatgttagtggagtacactaatggcccattaagtaagtacagcctgtaatcaggctataagcccagataacaatcaaagtatgggcttcgctgttcctgtacttagcattatattaagtgctaaccgtctttaaaaaaatccgtgtatttatcatgctacatcgtccctctgcaaacgccaataattttacgtggtctacttcaaaatgtcaaaattatgcgtaattatcttctgctacgctgttcccgtgccacctgcagtacgtacatttaaatagtgatgaaaagtaggaactttgcatgcaatcacgatgcagtacaccgtgcgctatgctaattccgtcccgtgcaattagcgtacagcccaataatatggtagagtgtgggtaagcgacagagggatttcaatgttggcatgtcatatgaactgcatacacaataacaccctcagtttaattaaaatatctactatccccataacagattatcctaccgatatgtacatgtagtggcctcggttgctataatgtgcttatccccaaaaatagtatagtaaaaaaagctgtgaatagtttatccaccttcagctcaccttgctctacatgtactcgcactgctatcacttacaacgttgctgctatcacctactacgtgctcctatagctttctacgtgctgctatcacgttcatatcgcttactacgtgttgctagcgcttaactatgccgtcctatcgctgactacgtgctgctataactatctatacgcttctatagcttactatgtgtttgtattgagccaacattgctattgtactacagtaagtagcatggcaggtccacctatcgctacattagctaagggattgaaagtaagaagtgcttacccgtaactatgcgtttacgctatgctacttccgtttcctgcatgtatatcgatccaataacatggttagagaaggaatttctactataataaaaagctccagctcattgaatgtcagaatatctactaccccgataacgcattaacctaccgctacattagttaagtatgtacattcttcaataattacagtaaaaaatatgctatgcgagtcagtgaacgccttcctcatatgtacgcgcactgctgtcgcttactatgcgcttctatcctttactatgcgcttctatcgcttactctccgccgctatcgctaacttatgcgctactatcgctcacccaattatcatagcatgtttttatatgaagcaaacctcgctacagcgctattatactaagtagtagggtgcccgaccccagcgatagctgctactacgcggtgggcccattttaattaatagcaggtgttccgaaaagtattatattaggccaagcgtcaccgcggggtgacgtaatcgcccccgttccgctcgcctcgtcggctcgatgcactactcgctgtgttattagtacatagttgtagggcgggcgctgcggcccgctagaacgcacgcgtgtgccgccttcgctgcgctcggcagcttgtgatggagccgccttcggcgtccaaggctgtctttgtacgattatgtggaccacctttaaagtggacagggtgtgacggacgggatttctcgcagactggacggtgtctctagtagatggttaggactagagctctgggcgcccgctatgtggacgctaggccttggtttgttagattgcccgcctccgcttcgctgcggcgggtggtctttagtttttgtctaatttggagtttacttacgtatctactcagtcaaactttatatacttactcgtgtactcatttactattgctcagattggtaaaatgtacttgagttaattctgtgtctcaaatatctcgcgatacactatgttttttgtgtgaacattcccttcctcgtcgatagcctccgggtccactgcaatcttgatcgccttccttgatgtaactctcgacagcgccacgtagagttgtccgtgagcaaagacgggtgactctaagtaaattcccacgtgatggatagattgtccttgggccttgttaatagtcatagcgaaagctggtacaactggaaattgcttgcgcttgagcttgaacgggaactctctatcgtcaccctctgtgtagaagatgatccgcggaatgaagacctttttccccttgaaaggtcccgacattataattgcttcgatgcttttctcgcgcagagacaacacgcgaagccgtgtcccgttgcacagcccagcatcgctgttcaggtttcgaatcatgatgatgggagcaccgacctttagaactatcctgtgcggtggaatgccagaaaagttcaacgagttcaagaactcttgctcaaacatattcgggtccgcaactccctccagcgaatcattggagagatactcccttgtgtctccagaaagacgcacagacaccatgtcattgatacgcctgacacttgcgttcgtaggtgctagaatggctcgttcaacgaagtactcatctggtatatcattgctttccacgcctgggtagatagcgtcaataagagcgttgacattacgctctcggcgactgtcatctgggtcctctgtgtcttcatgatcctctggcggttaaagattaaagtcgggcggcgcctccattatgtcgctctcttttgtttcttcatcaaccactgacgatgattcggtacttcctggtatgatgcacatatcgtgtggacggcaaatgtcgttttcgccgatctccgagttgactggatagcgaccctcgcctatgtggagtaagaaatcagagaactcggctaactcggctgcactgacctggtcaggggctgtcctcacacgcttgttctccgttagccgcacttgacgcaaatgcccccagagtggcgaagatttaaaaccggccttcactgcctcggccctcgtagcgtccttcaagactggcaaaatctggcgatgatctccactgaacaccatcacctttcctccaaatggctcggactcgttgggcatgagatcgcgaaatgttctatccacagcctcaaagcacgcgcggttcatcttcggcgcctcgtcccaaatgatcaggcttgactccctaaccatcttcgctttagcactctgccaggatagactgcacgttgcaaactcggacaacttgagcggaattcgaaacgtcgagtgggctgtgtgaccccctgtcaaaagagtagcggcaatgccactggaagctacagcaatcgcaactctgcgttgcatgcgaacatgggcaagtatctgctccaacagaaacgacttgccagtaccacccggcccatccacaaaaaatagtttctgcccttgtaccggatgattcaccgcttcaatcacttggtcgaagacttccttctggttctcgttcattcaataatctagcatagcggtctcttcgagatcagttgtgctatacgcgtcgagttcttggtggatgatatcaaccggccgagcatcttgttcatcaacctccgccgcgacatcgctgtagaacgacaaatctggaagaccgtagttttcgagtgtcttcccgtttgaatctaggtatttaaccacatccagcaaggctttgtactcagccatccgtaggcgaaagtccacctcgcgttcaatgttttttcccgcatcataatgctcgatctgccggacaatatcctcggacatttgtaccttgaagttgtcccaaagttctctggcgttgcgcggcagcgaatacaccaggataattttaaatagctgcctcagttccttagccatcaagaacaatgccgactccgccagacagtgttgccactcttggtcgttttccaagtaccctgcagctgcagctgcctcttgataagaggagtacaaatgaccattaatcgttcgaaggtcctcgaaagacttaggagaccgccgatgacacagcaaaagtcgcaggtaaaacctatccggatcttgaggagacacatgtgccatgcgtcccagcgaagccacgtattgtttatacggttcccagtgctttctaccctcggtaacccagcggtattttgtagggacgtctttgtacagaagacccgccgttccaatggggtcgtttgcacacaacttgaaaaatgcagtgagcatcgtattgacgccagcccgcaccaagtttcgaagttgtcgattcgtcgcgtgctgtcgatatgcaaccaagctcataccctccaagtgaacgggtaagttcacaactgactgcgtagacccttgagttggatgtttggacaaccgcatacatgcttcaacaggcgaaatgtagcgtccgagcaaatactgaagaatctcgttggcttgaatctcttctccttcaatagcgatcgtggtcatatccaagcccttgtacacgtaattgtagatgtacttgacagccctgtttgtcgaacacacttcgacgttgatgtggtaattatatttctgtgaaagaaatcggttgtatggcacaatccattggttgatcgtcgcactgtcccacactttacctttgtggaccacaaacccatcggaacgccgtttccgacggtatccaggactcttatcctggaccatagtcgttacctcggtaagaggcttgggaaacttcttagagcacctaccgttcttcatacaggggcagttcggattctgtcttccacatggaccgtgcatcatacttgagatcaatgtttcgtaaagttcggggtgcttctccttatcagggagctctgctgacactaatcggtccacgtctactgcggacacgggtctatcttcaggtcgcagaatcagaagaatgtgtgcgtggggaagccctctcttttggtattctaccacatgggcccgagcggcttggatacccaggatgccttggtcgaggtccttgttcaacgctttcagcttctgcatgaatactcgcgcaacgacatcaggcctgtcagtcgccttctcgttcggtcgcagattctccttgatttctggccagttagggttgcacgtcatggtgatgaacagatttggcgcgccggcctctcttacgattgccatagcgtcgaggaaacgttggtacatgtagcggggccctcccgtaaacgtggggggtataaaaatcttgcgcccgatattttcggcgtcaggggcatcggaattctcttcttcacgacgtggctgctctctggtagacccggtagcgcgtcgttccacctccgcatcagctgcaactctgtgagcatcaatggtctcgctgcgcaacgcatcacttagtccctgaagtgtctccagatggtactgaagctggttcagttctatgtagcgtagccgctcctgctcacacttggcccactggtctacacaatactacgtccacctcgcaggatgagagaattatttgccgacctgtcgtacaggagatatgcctcgaactcccttagtgacatccgtaacagctctccatcagaacctgtcggatttcccacgtacggaatgccattcgtccacccggtatcaccgaaaggtaagagcagaggatactgtagtgggtcgtagctgtcgctagtctcaaatatacgcttgaagccaccctgacgcgtagagagcaaaatatcgcgagcctgcaccgcatgctcatcaatcacaattgctgtcacttcggatgccgttggggtgttatgcgtacccgggtttgcattccgagatacatgcagtcgaagctggaagtcatcgttgtgagggataagattctgcaaacgcaatgcaggatcatcgtccggtatctcttctccagcggcccttcgccgttcctgttctacaaccgcttcttcgtaagcaggttgggcccgctgaaccaatatacttcgcgcgtgaaaaaactgttgcgcgtaagggttgtgtctttccataatttcatcgatcttttccagaaccgctcgatccaaaccgtctgtcatctgcatccgacttgtcacacgcgcattcatatccggatcgttgatgtagacctgtgcgtacattgacctcccgctctctgacggcaataatgacccaattcgatggcaaaccgagcccataacgcggaagttgtacacaccatcccgacacacactgtgatctacagtgagagagcgcgaccgtgaagcgcccatcgacgtgaacgcgaagacgttgttgtatgcacgaatcgaacgcataaacgccgcgttgtcgaacagttgaagaagcactgagggggctgcgtgagacggcggaacgcggatcaagccgtttcgacagcagcaagcggcagtctcatcaaggaatttccacgcattacagtatcgacaaaccctctctgtctcccgactgtcgtctgtaaagcgtgtaaagtaatgacgcccatttggaaccgtggcggggtcgaagtcttcgtagtaagcgagaccctttttgtactggagcgatcgtctgcgaagtcggttcgcctctcttctgcgagcgcgctcctcctccggcatggtcccccgtcgtgcacgttgcacaactgcgtcttgatttctgcgttcttgacgttgctccgccggcatgttgctacgccagttagccgttgcagtcgccgtatcttcccgttgttgccgcacctgctgatcgttaagattgctacgtctagctctcgtgcgcgcggcatccgcttctctgtcgcggataacttgggacgctggtcgatttgctctgctacgttgctttcgaattctgtctctttcgcgaacacgggtcaactgcgacggtgtcatatccactcttcttcgggacggcgtgctccgggcgggcgtcactaaaagggcccgatcgtctgtcattccaactgtaaatgctgcggatgacgtctccccagtagccgatacttcattcaatataagttgcggattcagaagtgtagctggggccacattactcgccgtagtagcctccaacgtcgatcttgccataccccgccctatcacaacaccctgtaacgctgtcaccactccaggaatttcagattctgtatcctgcgccgccgattctctctgctgctttcgaaaacgtgacaacgccgagtttaggttgtttagccttcttttcttttccgctggggtttcgtatccatccggtgtaggatacgattctttgacatcgtcttcgctcgtatactttcgttttcgagacatgaatcctgcaacaaaacaaacgaagctctattagttatccgtaaaagtagcatgccactatgtatggttctatgctttgttagtaggtgagtaagatcagcatcgcctatgccgtttgtcttccgccgcaccgccttgaagagatttgtaccgtgggttaccgtgaagggacttctgtgctgtttgcaacccgcgtccgcagaaaaagcctaatgtgaccacatcacctacggtattcccagtgttactataccaactgcaatttaaacgacggtaagacgcctcattagccaagcttttgaaccggtactttttttgctttcagttcctcagctccacttttaccgccttgaagcacaacccgctttgttgccgccgtttctcaatacctttggagaaattagctgcgggttattttcggtgctgaagcgacaactccccactattgggttgtgatcacttcctttggtgaccgtggtagagtgtctgcttaatgccactaagctatttcagcccaggcaattaaccacttccggttataaggggtaatgggtcagttgttgggtattgctttaattaccggaacatccactggcatcataggcatcgaaggatcgtttagaccgctaatcggtacataacccgaaaaagcgtaggcaaagtagcacacatcaagttttcttctactacgacacaggtcgcaataggctagaaaccccttatgtagcaatgaaaataccgctctcttttgtcttgtgtgttgttggattgtatgtttgggtgtgggtgggtcggaaatgcggtaagcggttccagttgccgaagcaaaaagatttccgtcgccccccgaaaggaactgacggtctcagtttgccgctaaacaaaaggtaagccataagccctcaagtcactgtccccagtggctcggctcgggtccccgcccaagccacgtggccggccgcatgcgctctgtcgcggacacagaagcacggaaccgaggtttcccccaatccaacgtaccggtcccatacactaatagtgtaacacgaccactattccgagttttaaacaggcggcctggcaaagccggcttttatcgccacatggatctgccaaaactcggttgggtatgcgtcttcccatgccgctggcgggcaaacatgggcgcctcagggtcgcggctccgaagagcaaaaggtgcgacagagctaagtcttagtacggcggcgggtgccacctgcaatctttcttatcctaaaaaggcgtttaaaacatccccttattaaggatgataacgggtttaaagtagaaagccacagtactacagtataatcatgccaaataattaaatcggacactcatacaaagtagcaatgttgtggattcagagcgactgtccggcggctgcgcagtccgtaggcgtctcgacgtggggtgggctgtctcgtaggtatggcggcctattgcaacatcccacggacacttaaataagtgtccctaagaacgcctaataagcaccagtctacccctaattccgtactagaaaccctcgactgccctgaaggtaccagttatcccaacaggcggaactccgaaaccgtaaagtagtttatttatgtagatgtatgcatgtaaagtgtccgctgccgctgcactccgctgctcactcccgctcgcttcctcggtccgttcgttcgccgcgcgccaactttcaaaatgggtgatgtgataatcacacccgttaaagtccgattatttccgcgtaagtacgatttttagcgtgattgtgtctagttttgtagtttcgtaaatagttaaaaagccagtgcgagtcgatttgatgagtgaataatgcatctgttaggtccgcggtaatgtagtcgaaatgacaggtctatgctgtaggtgcgtaaagcgtgacgaactgaccgacaggactctcggttagaggacggagaatatgaaaggagtgtaagtattttaaaaaaatataaggtgtgtaagtaaaaataaaaggagtgtaagtatttgacgccttgatcatgtgactttcaattataaggcatctcttagcaagtcagaagatgttaacatgctaatcttaacataaactttgctgtttcgagaaaattagaaagtactcaacgttctgtatggttgttgaggtatacaaattggcgtaggtacaatagctttgtatactgaccaaactctatcagatttgagaggaggtattcaattcggaaagggtacgctatttggagctatccgttagtagaagagatcaaagagcctaaggatggctacataatatgtattgtgccttgcaaaatttttggcaattccgatgctcagggaaagtaggatatatcgggtcggatataatttgccgctcagagataaagccgagggactcccaaaggtggaggtacgatttagcttgttaaacctcggtcgagctgatcaagcaggtcggaattgccgttttaaatcggccaaaacgaccgccctcccgctatatttgatgcggctgtcgcgccgttgcgccatatcggatgccgctcttgtgggactccgtggcgactccgtgtagtaggtcgaggatttacagacagaacaccaacgtgggcgctggaacgcccaaagccaccgacatatactatgatactgctgcttatgttcttctgctgctctctgggtaaatcccgaactgacgaggctcccccgagtgttgcctgcccggtataggcagtccaggaagactggggagccagtgaagcttgaatagataagggtaagggccacaggaccgaaacccactacactccgactccggcgctactatactcttattgtaggataaggaagctttctctcaacttggcattccttgcgcttctctgtcattgcatctatccaatcaggacaagttccttaatgaatttagccaatcacgatcgattcgtgtgtatcccaacattttcccaattattttaagaatttacagtcttgctagaataatgtccaatacaaaaattaagtgtaaatgttgcattactcatatttgaccgcaaattcccaatacaaatcatgattgtattgttggtggttgtgcctcgtttgctttctctcctctcccatttgaaaagatgcagcgggcgccgagagggcttgacatcccgcaagggacagcagggcaggaggcagcggcgatgaagtgcttcagcgaattcttagctcttgctaacataaatgaggagtcaattgctagtattgcgaagtcgctgtctattcctgatgctctacccagtcaaaacttttactctttgctaactgccttctccactttcttgcaaactaagccaagtgctcgaggagaccgtcatgctaaggctactgctgtgggctatatgccccaatttgtgaacctgctccgagatcagtaccctctgtacttgtcagacagcaagcgaattgcgaaaatacgcgacaaaatgggttcaactattgaggagcgaaatttgctagctggcgtgcagactggtaaagctccaggctgcacgctcagcgacttgcgtgttcgggtgcaggaaactgcgattaacggggttggctcaggttataagagtttgcatgacgctgctgtactaacgttaatgtcgcacacgtttggtcgagcgatcgatacctgttttgctaggaagagcaagctatctatggcggcattgggggagctctttctgcatctagctcgaatcaagacttcggtggttcaaggcatctcgatttacaaggccgcgactcactgggagcagtgtatgctgcacggcctcggaatgctgttcgtcggagcgtcggagccttccagctatgtgttcccgctagtgccgcaagcggcggcatcggattttccaggggagaagacctacagccaagacgaagctatactctactaggagaaccttgaagagaaagctgaaccaaggaacgagccaccaacaaagcgcgtgagaggaaggcccaacgtgtccaagtatattaacgacgtcatcaccatggtctgcgagcgccaagcccaagcctctgccccgctgtccccgacgctcaccgcagggctgagcagccactccttgcgccgcggctccgcagcgtatgcgaacgcctcaccgcagcttgcgatccagtggatctcgacccggggagcttggctgctggactcgctcacgaaggcgttcgcgtacgtgggtaccacgacacgcgaggaccagagtgtcggcaaagtcctcgctggataccgagacccgcacctgccatgcgtcacgcccacgattgtcgccttgagcgagctacttcctgcgctcgagtacgcccagctgctaaccctgcgcggccagctcttcaagaacgtcagcggcttcacggacaccacgcttaacgtcgacgccttagtcctggatgtggctctggcgttcctgctcttccatcttgacgacgtcgcgacggcagtccagcaggagcaggctgccacaggcttcacatcgcattacctgtaccgcttccacgaagctccggacgcaaccaacgtagcgctgggagctcggctctcgctggacacgtgcattggttggggtcggcagctttgcacggcttggcaaacggagaacttcgggcagctgggtgaacgcagcaatggaaacaccaccatacttgccgcagccgtcacccagatgctattgtccatcgcagcaatgcagcgcacacttcagaagctcgtcgtggtccacgagagcaagtccgccagcgctgacggtcctgctccttgtcgctgcgctggccagaccccgcaggcgagcactgacaccgtcgttgaagcgcactctcttgctggatgcttctacaactggtacacactggagctgtggcacatagcaacccaaacgaaacaacaatttgttcgcgctgacctcaaggcaggcgtcaacatcatgatcatagcggcaggacgagaggtagactttccaacggcgctactggaccgggatggcgtcgcgtatcggctgtggaagcagcgtgtctggacgctagcggaagacttggacaagaaggtcaacgctgcgcttgggagtatcgacggtaaaggccgatccaaaaccgcggggtcgctacggaagcgctggaggaagctgcgcgttgaccaacgctctgcgtacgacgcgctctgctcagcatttatcacccgcaaagcgaacggtggcatcgtcgaccgctgcacaccagctagtcaccaatggaagcaaaaatacttggagtcgtaggatcacgcagcttgtattaacgcttaatacattcctattcctataacatgaataatcgaattcaaggcgcaaatgcacccgtcatcgccatcccacaacttaaacacagcgcatagattcccgtcagtcccgatacaaagtcatacacaatagaaaaacgctcacataccgtcagcgagcgcgcacgacctcgtgcttggccgacagctaccaaaaccggcagcataacacccgccctgccgggctttgtagctgctttcgacgggtccttgcgtggggcgcgcctgggggcactcgggtctggtgtggccggcggggacggcgtgcggcacgctcggagcgcgctgttgtgttggagatgcggggcggaaagtgtgaaggcggagaaggctgtgcagccagccaaaaataaaaccttaaggttttttcttggctttggtgccgataaaccagtccatgctttgttgaagtcatttggaatctcacttatgattggctctcgtcattgggagcggcgtttggttactgtagtattgtcaaattttaagtgtgctctatgagatattccgtcggcttgcccgctgcacctactctcgttgggtggttaaaagtacccgaaggtgtcgggggccaagtacactttcacaacgtcgaacttgaacttcgaaataagcagctcatttcacaaataagccacctctggaggtggcttacttcggaaatgagcaggaaatttcccaaaaagtaagcagagcaactcccaaactgtaagcactgtttttgccaggttcgacccccccccctattgaaattaccgcataacacatcatgtatatatcatagagcaccccggatcggggtgctgcgatctcggctcggtgaagcatagctcttggctgcgacgccatagccgcaggcggccgcggccatgaacatacaaggactgtccgtaggtgtgtgtgcattaggtgtcgtctcgtagacagtggggcgctctctaagctgtctgcgagggcaaaaaagctaggtatacgagacccgccgcataagtgttgcgtatgtgctgctgtcgcgtgcttactccggtaggctctcccctagcggccgccaacaccacctccgagaatactatcgagggcgcagggctgtggaaatatagattgtttattgattggcgactcagatctgaaacaatcaattattgcaatcttcacaatcccaaaaacaaaagattgcaatctaagttctcgcttgtatttcctctgctaggttcatacttttactcgtttggcggcgctatcgccctaatatctttgcttattcgattgcatacgtgttaaccttcaaaagccttggcaaaaagcaatgttgggtcttgtattcatcatgttaagcgtgtaccccgttcgggcacccaatgatccctcatttccgcatttcgaagtagcagatgacacagaaaggctttgatgagtctaggatcggttccatgggcttggtgttgcatattgctctaccggatcactggcaaaggctcaaaatcagtaaagggacaatatgggaacgggattgtcgattgagatcacggaacaatcaattattgtgattgacaatcttgacaatattacaatcgcaatcatattttccacagctctgtcgagggcgcgcacgctggttgcgctgcggatgcagctcaagtacgcccgagacgtagcccttactacttcgccctctctgcttcgccaccacgccgggaaggggccatcgtctctctctaagtgcgatttcacatttattgagcaatttctgactacccccgtatcgctcagttttgcttatcttttggtcattttcttgctcagatgacgtgcaatatagaaccatatcggtaagcctgctgaatacttccgtgacaataatttacaggccccatggtgatgtggcgctggaagaaagcgggtgtactttcagttcgctgttttagcgccgtgaccgtcctttcgagtctccattttcagtttcgcagccatgggctcatcgacttccaaggcgtcgcccctggcgccgacgttcaagcgcatggcagcatgtaagatctccagccgcgtggctgcatggtgcaagcgggaatgctcctaatgcaagtcttgttatcttcaggggacttgaagtcttcgcgacgattgctgcaggactacaaggacaaggacttggatttcggtctggatgctcaggggctggcggatctgctcggaggcgacaaggactgggctgaaagcatcattgacgctttcagaagccccacgggcatgtacgttgctcccacaacaacattatagaagttgttttgtattgattcgggtgctggccgcttgaatttctagcatcaatgcgcttgcgttcatctgtggagcgtgcttagtgtgctctggaccggcactggagaaggctgcaagtacggccagatcgttatttatttgaccaaacttgtgtaaactaaacttcgatgctgcagtgatcttcgacgcgttagattttgacggcacggagcagatctcaatggacgaaatggtaaggcagaaggtcggcacttcatatacgatgtctgcgtgaaaaacggtaaccatggcgttttgtggcagaccatttcgctcctttgcaccacgcgtgggttctgtgtgatagctggagtgggtactgtcccctccgatgaagagctggagacagtctcgctgcaggcctaccgcgacctgaacaaaggttcaactcaaagtatcaccaaagcggagttcatgaagtggatcatcgaattcgcaagtggggccggagctcctccaacacgcgaggtgacgctgcaaaatgcactcgagcaatttcgagtggtcccgccgtctgcgaatgcagaggagaaagaggagaacaatgcttctactcctctcctagacgacaatgagttcggcggcgctgaatacgagagtgagcttgtccaaaatgacgaacaggagttagaggatcctccacagcaagaaacggatgcgccaagtgattttgttggtgagtacaccatcgatcaagagcacgaccctattgaacagactgctgggtttacagagtccattgagcctgagcacgttgctacagaggtcgacgggcagcttccgaatgacggtgaagccactaccgatcaagacaatgagcccaaccttgtggagacgggggtgacggacagtgctccgattgacgatgaaggccaagctgaagcagaggtcctcgaatctcaaagcgatgaccaaatcaacgaacaagaggccaatgaagcgcagcaaatagcaagcgaccattacgatcctgaagtggagactggagcccacccagacgaccctgaaagtgactgtcctacgtttgtggaggacggagatgaattgccacaagggtcggagtcttttaccaacgaggaacgcgaccaaaatgcacctgcgcaggagcaaaacgctgaattagatgcagcagcattggaaccagcagcgagtatggacggacaagacgacaacgcatatagtgacaaccccgccgaagcacaggacactgagccagttgctgtatccgaagaatcggtggcgaacgagccaccaccagagccgacaagtgctgaggatgctgataacgacgacctggagtacgagcaagatgagttcgcacaagaaacaccgcgaacagaacgagaagtcgaagctgtggatgaaacttctcgcggtgatgtcgtggaagctggtaatcctacagaagacccagagcaaaacacggagcccacggatgtccctattgaaaaggcagctgaaaatcccaatccagccaccccagaggctgaagcggaggtcatcgcagctcaagactttgtggatcaaggcggcgaagtacatgcagatgaagctccagcgccaattgcgccgcaagaccatgaaaatgctgaaacaggagaagaaggtaggactgctcatgcctagttccccttggctaaatcgaataactaatcatttagtgtggtaggaacctctgaagccgctgcaatcgctgaagctgctacagttgatccagttgatgctgatcctgcggaagacccagctacagatctcaacgcatttgatacttacgattatgaacaaccacaattcgatggaagtagcggtcttcctccccccgagccgcaggagctactagacgacattgtcatcgttgaggctgatcctgaagcaggcgctggtacagatgaagcacccgaagctccagctgagtaaaggactcatgacagcaaagactaggtctcattgcaaatatatgaaggtggatgcctcgctctagctttcctcatgagtcacgacaagagttttcagtcggagatggaggccacctcttattgatcagctagcaatgaactccgcccctaagccaatgcctggtcgattagatgctcgccatcgtcgctgctatcatcgtctccatcatcatcgtcgtcatcgtcgtcgtcgtcatcatcgtcatcatcatcgtcgtcgtcgctggagtcgtcgttagtatcatcatacgagtggttccctccaacctcagaccccacttcttcgacatcgtcgtcgccctggacgctttcagtcggctcgacatcatctccgggggttgacactgccttgaggatcgcagggttcttggatccttccttagcggcctcttgttgagtcataagtgcaaacggcggacggcgcagacaccgcctcttgttgaaccaccgccttaactgggtcatattcacatccacagtctgcttcttcaaatcacgtagcggcggcgtgttgagctgcaccaaatagttctccatctcttcttgcgacggcttgtacttctgctggaaccacgcttccagcgccgtcaactggtccatagagaacttcataggccgcaacacacggcccttcttctccttcgcgcgcggcttcgctggacgtgcagctggcttggctttcttctttgccggctccccagacaacaacagggacgattcatccccaaacactgcgccgctgtggtccagcgtgctcatcggagcgtgatctccgcccagcggcgttcttcctctcgcactcgatgctgtgctcagagctggacttgaaggcgcagacaatggagcgtcgtcatcatcatcctgctctacaaccgcgcggcgattcatgcccaaactctccattaacgcaatcgtggccttccgcagcagcgtaggcttcgtgtaggccttcaaaatctgcttcaggtcggccactagcccagtctggatacgtacatcaggctcgaccttcatagcccgcaacagatcgaccacttgctgcaagccgttcgtgacgatggccgtcttcggctgctccatcagactgcgcaaccggttctgcagtgccatcacttccaggacggtggcatgcttcaccatcgtaatatcatccaattcagagtcctgcgtccgctgccgcttgccgcgtccactggcgttgtgtccgagctgatcggcagtcgtaggcaccgagtacgaagccgcgatgtacgagcggatgttggtcggccgagtgaaggcgttcactgcagcgtcgaaaaggtagctctgggcacgtacacggtccacctccttcaccagctcattggggtccaccgaggcccgcagctgtgtgatccgctgctcgagacgcagatcgatctcctcctccgcagcttgagcgtcgtggcccgcctccaccgcgagcttcacgtagcgcatccgctcgcggtagcggcggcgcttgaaccagtcgcgcacatgggccagcgagaggccgcccacctggaacgggttcgcgtacggccggtagttcaaaatcgtgcgcatgagcgtgagctcgtccagcagtgggcgcgggtacgagtagtaccattcctgtagcttctgcacctgcaggggcatgtagagtcggccgaaggcggaggacgagcggccgcgctcctgggcgatggccgtggccgtggccgctgcggcactggcctgcacggccgcctcgagggcctggaaggtgccggtctgcagcgacaccttggacacgagattggcctcgccctgcatgctggtggcctgaataagctcggccatctcgcggagacggaccatggcggcctccatcttggccagcgcgcggtccgtctggtcctccgtggcctcgtccacgccgctgggcgccgccagcttgttggccgcgtcgccggcggcggccgcgcgcgactgctccgggttgcgcagaggcagcatggccatggcctggccgcacgagcagccggccccgccctggccacctccggggcgctggcccgcgcgctggcgggcgtcggcgcgcgcctcggccaggcccttgatgtccagcagcagcgcgtcgcagcccgtgagcagctgcgacgtcttggccgtgatgctcttgttgtacgtcttgccggcgtccaacgactcgcgcacgagcttggccacgagctccacggccgggttcaggtccacgtcctgccaggccgcgtgctccagctgctcgtcctccgagtcctcgtggtcgctcacgccgtccgcgtgctcggccggcgctgcaggctgcgccgccggcacctccttgcagatgaagtccatcttcatggcgctcatggtcacactcgcgcccgccctgtatataacgtccgctcggctccagttagtgactggcctgctctcattaacgaagggggaggacgaaacgtggtacactgtaccactcccatcttgttcagtgagtgacggccggccaattgacgcacacttcactacgtacccgctagcggcccgaaggcgacgatgacgatgacgacgtctcagctgcagctcgtgtgcgcgctcgagggccacagcgagcgcgcgtggcacgtgtcctggcgcttcgacggcaagctgctggcctcctgcagcggcgaccgcaccatccgcctctgggcgcccggcagcagcggcgcctgggagtgcgtggccatcctcgaggacgcgcagggccgcaccatccgcgcctgcgagtggtgagtcgcgtcgcacttggtcgccttggcctggccacgaattcaacttgctaatagtatcgtgcccgttgcaggtcgcccgatggccgctacttggcgtccgtgagcttcgacgccaccaccgtcatctgggagaagcagggcagctcgtacgaagtcatctcgagcctggagggccacgagagcgaggtcaagagcgtggcctggagcccgtcgggctcctacctggccacctgcagccgcgacaagagcgtctggatctgggaggccgacgccgacacggacttcgagtgcatctcggtgctgcacggccacacgcaggacgtcaagttcgtggcctggcacccgaccgaggacctgctcgtgtcggccagctacgacgacaccgtccgcatctgggccgagaacgacgacgactggtactgcaaggagacgctggcgggccacacgtccactgtctggggcgtggcgctcaacccgcagggcacgcagatggcctccgtgtccgacgacacggacgtggtcgtctggcagcgtgacgtcaatagcaaggaggtgaacgaggacggaaggtaggcaggcggactcgattgactcttgtattgatgatcttctcaagacaccgttgctaacctgatcttgctacagcccgaaggagtggaagcaggccttcacggtgtctggctgccacgagcgcaccatcttcagcgtggactggtccaagcacggcgacttgctggtgaccggcgccgccgacaacgccatccgggtgttccagggccagccgacagattcgccctcctcgttcgagctggcagttcagcagaaagaggcacacgcgagtgacatcaactgcgtgcggtggagtccgcaactgcaggaggacggtggcaagaaggcactgctgctcgcgtctgcaagcgacgacggccttgtgcgcatctggaagttgcagttgccctagggtcaaccaaatgtagtcatctgatgacaagccgagctaaaaccacctttctttttttttgtacaaccgcgaaaatgtcttagcatccatcgattgactcgaaattgacgacaactgacccggtttactcgagcaattacaggtcacttgtctagtcctgtaacgatggtgatcgtaaactgcttcttcgtcgtcgaagggtgtgtgatctctatctcaattgacgaggggatgacgataggcatcttaaagcaagcgatcaaggacgcgaagcccaatgacctcaaggatctcgatgctcacaagctggagctcttcccagcgaagacggaggaaggggacaagtggatgactcgtgaagaggcgaaagcaggtgtgggtagtcggaaggcgttggctgcggaaatgccactgctcttcgctgggttgtcagatgcggaagcgcgaatcacgaaggaagacgttgcagcagggaggatccctgttcacgtgctggtggtggtcccggggacgattcaatttgcgtatcgagctcccaagtgtttggttactacggagggggcgcagtgggatttccagaatccgctggatggcacaaaggttgcagaagctgtacggattcattacaacttggagggcaggaaatcctgacaagaagaagcaccctttgtttgtgtgtctgggggcaccggggaccgggaagtccagagtactggacgagttccctacgctgatgcaagaacgcatctttgacgagaggacgcaggattcagagatcacgacacttttgaagagcgccttcactttcaaggtcacttttgaaaccgaaacgagacagcagtttgcgttttcgcacccaggataagcgatcggaacccgaatgttgtaccagctccaggatgctatgctgtggcaagaatttgctgaagatagatcgcgtcatcaagggcctgcgcaagtactgtcgatgctgtcgacgataactggtgttgagcaaccaatatgtgcgtgattctgtgcgtcgacggtatgcaaaaactttcgcatgagaccggaagcaggacttcagagttttattcggctttggacgctttgagtgacattgttaacgcggccaagtgttgggtgatcgctatctgctcagcaacaatctacagcccagtgaacgagtttcttgctggatcgtcgcagtggagatacaaagttccgaccgccattctctctcgtccgcgggtgcagaatgttgacgtattcgcggggtttgatggcgacgagctgatacaactcttgattgaagatatgggcggccatggcagagctgtggaaactttgtataatgtgatgacttccagagaaaaagcaaaccagtcgatggagtttgtacctctcgttagtgatgtattaaccgctttgcgatcgcaataccctgtgattgaaatcgaagtttcgagtatgagagaagcattcctggcggtcatcgcacggcgtcaagttgatgagcgttctcgctttggggcgttaagtctggatggtgtgatctcgactgggttaattcggctagaggaagactgtctaacgtgcccatatgtgctatatctgctgttgaactccaatgagtaccgtggagtaagttttctacttatgcaccaaaggaagacggcgaagatgtgaaaccttggcaagcgtgggagctttgcgaccacaagtaccgtgttctgaaatcggttgcatggtcgggggaggaagaggtgcactggagacagcttcattttggagctcgttttggtagtggctgcgatcgactcgtgcgtgaacgtcgaccacgcatgtacacaccatctgccaagaggatgcggacagataatgtttgcatcgaaggaaacgatcccggacgacagattgtctatcagcccgtggccgaatcctctcttggctatgcgtcgacgtatttggaagatgtggacaaccaaggtgccactatccaagaggttcgtcactgcaaatgcattgaaggggacatctcattggaaaccatccagaaggaaaaagcaagagtggctggccccaacgatttgttcctactcttctgcactggggaagtgcaaggcgatatttcattgctggagaaccgtgctgtcgtcgacagcacgtgctggaaggagtattacggtccatttgctgctcgcgctttgtttttgggcacagttcctccaccctgtcttaacacgagttcagcgtcaaagctagagctcgtggtgggtatggatcctcgagttgcgcgaagatcgaagaacatcgtccattctcaagctacgaagacgcccatgtgaaaacgaagatccccatggcgattctccagaggtttacgttgggcgctatccgcccgagcctgtgacgtcagaaaaccgtacaagaggttcgagtcgtggtagatgcacacgagaaatcgctattgaacacttagcgatcgtataataagtgaaaagaaaagttgcccttacacgttggtacatgtattgtggctttcatccgttttggcaaatcgggtggtcggagatccgatatatcgggcccgatttgctggagggctccgatttagcaggaggggccaaactatatctggcccgatttgcgtctggggtgcgagttgcgaagcaggggccagaaatgccgcttttcgccggcaaaagggaccgccgcgaaaacatgtctaggccctctcagatcggcgtggcagatgatcacacaggtgatttagctggccatagtgctacgaagtggctatatacagtgtactattgtccccaatgtcttgcagttctaatgcgtcatgagaggtgaggaggtatggccaacttggaatgcctcccctctgagccttatgctactagctcaggtcagatatagctaaattggactaaccgatcatgtaggagctacatttaatataaatcggactccgagatatgataacacgtcaaatcgggcggcaaaatagttgaaaaccacaatagtgattaacaatgggaatctgcgatttggtcatttttttattggagatttgggctgttccgcccatctgcacaatttattatctgagaatggccgcgggcctggaagagctgcagggcgagccgcgctggtccagcatccgctacgcgccccatcctcgccccgcgcagtggtcgcgcgcgacggacgagaagctggtgctgctggtgacgcagtcgacggccagcggcgagcggttccccgtggccgtcaattgtgcgttttgttgcattttcagcggtttccgctgctgtcagaagcctgtagaattagtcgtcgaattgccaagggctaaccggttctaatgcacttgttgcggctggaattggcctgatattcgcagggctggaggtgtctcgagtagtgcggcgctcgcctgtggactgcgtcaagcgctacgcgttcctgcacgacgccagggagcgatacgaggcgctgggaggagagcagcaagtggaggtgaaggcagaaaaggaggaagaggagacgggagtgttggaggaggagcttgaaggcgcactgctggacagcgaggacgagtatctggacgagcaggtgctcagcgactttgcaacgcccgtggcgtcgcccaaactgcaagctctggacacttcaggggagttcgtgaggagtgggcctacgtcgcctgggtcaccgcctccgtttgcagttggtcgaccgatggccaggcatgcagggggcaatggagggagcccgttccgatgggagagcctcgtgaacgacccgaactacacggcgccagtgctcaactccccgccaagtttgcgccacaagcagagctatcaggggcgattcgggcttggagatgacgaagcgaaggcgttgtcttcagcgtcatcgccgagactgtcgccgcgaggattcatgtcgccaccccgctcccaggtaaaacactcgattaccttcgttgaagttgtatcagttagtgccctgaacgcctctaacctgcttgttctgcttccatcgtgtaggaccagattggtgaaatgggcgccgacccgaactactcggcctcggttctcacgcacgccttcaaggggttgaagctaggcgccatgcctctcggctccccgccgctgggttctcctcttattggatcacctcgcctcagccggaagatttccaactcaggtaggaggaggtcggcattccggtatccttcttgcaaggttgttatttgctgattgattgttatacggttgttttgcagagtaccccttcttaaaggaagaggacatgtctgctcgtcagtctgctgcgagcagcgctagcagcagcttccgcggtcttggcggagcggaagccagagcaggagcagcgccatttttgaatgacgcgtatgggactgccgaccccacagcgggggatctgcagcgacagatgaacgcgcacctcatgcgcatgtcggccatgtccaccatgtcatcgttccacggcgacaacccgttctcaggctccgtgacgcagtcagcacttgaggacgccttcttggatatggccggctcacgcttggacgcctccaatgttctgctcagcagccgcatgtcggcggcacctggttctcagtcccaaatgcgcctcgagcagatccaagccctcgaacaagagcgtctgcgcgcgcagaatgcagcatcgaagccaccagagtgagcgatgaatggtgatggcatatttatccgttttgatcagcgaagatgaagtgggtgaagttgtaagccgtaagcagagagctctaacgaacacgacaacaaaagcgcacgcaccgaaatgcctttcaatacattttgtctcttcatatccgtgcaaaccgctgcagttcaaaggcaaaaaggcatgaaatgcattccaacgcactggagagaagagggagggaggagaatggacgcagacgtccattccactcacgcctccttcgcctggtccacaaaatggaccgatagatctatgccttggtatcgtgggtggtctggggcagtgcgtcctgcgcggccgccttgcgcttcttggccgcctcgccctctttgaacttggcgtaaccgtagaggataccgccgaccatgccgaacgtcacgtagatggccgtgtcgggcttgagcggctcgccgagcagtagcacgccgatgaacgtggtggggatcttgttcagccctccaaccgtagcgtacctgcatattaaacacaacgacaccatcagcataagtccaagtgtacagctatccgattgctaagagagagagagagagttgggaacgtacgtagtggcggacgtgaccgagacacaccagaaggaggcgaggttgaggccgacgcccagcacgccgctgatgaagagcagcatggtgaagttgaagttgccgagcagcgggttgctccagaccgtgaaggcctcgccgttgagcacgagcgggggcgccagcagcggcagcgagatgaggttgttgtagaaggccatgccgaacttggagatcttgagcgacgagcgcgacgtggcgtagcgcatgtacagcacgtagccggccgtggccgcgcagttgaggaacatccagaagtagcccgagagcgtcgagggcgtggccttgccgcccacgtcgctgtacgaggacatgacggcgcccatgagcatgacgccgaggctcacgagcacgaggccgcccacgcgctcgccgaagaagcgccactcgccgaagacgataatgatgttggtcacgttcttgaacacggtcacgatgtggatgggcagccccgcggtggcctgcatgcccgtgtacagcatggccacgaagaagaaggtcacgggcgcccatttgcgcgcgatcttggcgtcgtacgggtcgtacgagatgagcttctgcatcttggccagctccagcacgagcacggccacggccgcctgcacggccaccacgaagaacttttcgtcgaagccgtagtacttcttgcccagcaggtagcggttcgtcagcaccatgacgttcgacatgacgctgtacacgacgcacgacgcgatggacagcaccagcgacccggcggcggcgtggctcttggtcggcggcatggctacacagtgtaggagagagagagggaggtggaggaggagactctgctactgactgccgcctgaggggggagcgatactgctggagtgagccacgtaaggagatgtcgttacgcccccggtggtaaaacggattcagttgtaccgacaatgtggtacagttgtgtgagccacctcagcttgaagccatccaagcagaacaaaatgtagccatttgcgacgaagggacgcgagcggatattaattcactgccagctccgatgtcgatgcagcagatgttgttcacccgcgcggccgagcctggaagctggcagcagggcagctccgcgtggtccggaagcgacagcagctcgcccagacgcgtgacgttcgcgacgccctcgccggttgtgtttcgcagtcgacagccgcgagcggagggggcgagtccctacgctgcggatctgacgcaggaacttcagcgcaggcctcgcacacaacaacaacaacaacggcagacgcagcgcaatgcagccagcgcattaaggtcccctgcagctgcgagaccatgcccgcgcccgcgacgtcctggttgggacgccgacgtgagccacaacgcgacgttgtttgatgcgtcgctgaagaagtcggtactgtttcagcctcgagcgggggatcgcaggagggaggaaggagcggagaaggagaacactcctgtgttaccaaggagacagaacgtggccacgtcgaagcggaccaagcccactgcagcgagggcacccgtgcgatatcggtccggaccctccagcgtgtacgcgcagccgcgccaaaatgtgacgcactggcctcaacgcagaacgaaagacttcgtgaggcagaacattgaacagctaacaggaagaccagtggatgcacgatctgggcgaaccgcaactcgttctggtatcaacgagagcgggtttgagcgcttgtccgcacctcgaataagcaaggcattgcttcgctctcacgtgctaccacctcatgtagaaagtgaggccagtccagaacctgtgagatccccaagtgcttcgtcattatcccctcctcgaccggcgtcggctgcgtcaccagttctcacaatcgacccgccggcaccagatcaaggtgattcgtcgaaatcgacatctccgtcgccaggaccacggaagcaaggcctcggatggtcgtcaccctactcgtccccacagcgatcccaacagtcttactcgtctcgacactctccaacgcctcgctccagctccacgaaccgcagtagcggccaaggttctcgaactcgacgatacgacaactatccagcgcgtgtgtttggagttctagatcgggataatgagaagcggatcggagtgagtcaaattctgcaggggcttcgactattgggactaccagcgacccacaatcaggtgaggagcagcgtcaaaagatcgcgccgacatatttgcgtactcagtccgaattctttgctgtgcagatctccgactacgtctatctcattcacgaaggtcggcacaacacgatcgacttggaggaatgggagattttggtaggtacattagatgctgcgtctcgaccgtcaagcaactctcctcgtagtgcgcacggcagcacaacgccctctcgttctccgtcattacgtagcacgcaggatgctacttcacggccattgaggaactctcctcgtagcgtacccagctataccatacgctctcgttctccatcacagcgaagcactgtcgatgagttaccatacagatctactacgactaaggctaacgtggtagccgaacaccaacccatgcgagacgatgatccctacctcgaggaaattcaggtaatccctctcacaacatttgttttgatgtacatgcgacttattactgtcgcgatcaatttgtagaatcgcattgaagggatcttcgaaagagcccatgccactgcaacgctaaaatgggcccccgaactgggaaacaaccaacacgagagctactcgaggtcggatcgcattctaaaacgcgcagcgactgtcgtgtacagtcttcgagtgggttaaataactgcagcaaaggataggttacgtgattttcaggctgattaactatgttgtgctgacttgctacattaaggcttctctgtttccactagtgcatcaagctgaagccacacttcgggagattcagcagcgacatggttcaaagttgtcgcttttcctgcccccaggcgacatggccgcaatcgctcaaaactcagatatgctcgcatcagccattctggacgacatcttactggtaagtcattctctgaactaggcgagttttcagtagtctaactcgttggttgatacgaatacgaaggacacggtgcagttgctaaacgacgaggacaagcagcagtcctaccgccagctagaggcccaccacgcggaccagctggacgatatattggctcgcattcaagacatcgaacgacaagaagacagcatgattcagcaaggccttgctctaagctatgatattccaggcactaaatgcgatctccccacggctttacggcatgaagacgcaagctgtgctcgtactcaaagcaacggcaccgaccttcaacacctgagactaccgctggaggtggtgatgaatatcaacattccggacaacactacaccgacccaggagcttcgagaaattattgctcctactaccagccagaacgaagacttcgacagagacgagttatcagcacaacaagctctgattgggaatccagtgaagacttccatcttggaaggcaaacgtctccagtctatcgagagaagaagacacaagtttcagcaccaccgtcgactcgtcgaatcatctcttgcagaaactggaatggcgcagtttgctgtcattgaaatgtgggtatatacttctcgcgagagcttcagctctcgtcagctaacatgttctatgtatccttgcagcttggaagaaatgcttctggatgacctcgtcgagcagactgccgcagaattgagtgataccgtgttgtcaatgtccgacacgttgttgataaatctgctgtgaatatacgaaatctatgcagaatccttcgtgcgcacagccgtttgcactacgctcacggccgagatgaccttctgccgctgttctgacctcacgggaatgtcttgccaggccacagcgtcttcgtaactacactgctgttggcgagagctcatcatcagatcatccaccatatcgtccaggcagcgaaggacttctctggcaatttgttgatcgaggagtgtctccgtggccagtctggcgtacacgtcctccgacaagtggaattccggcatacttttactgttactttcgaccggtcgagttccacgcagcatcgtattcttccctcgtttgatttggatgagagtacgccgggcaaacatttgcaaagtgcacctcgcctcctcctggatgcaagagcgtacacggtggcattcataaataaacgtgccgcgatctgcgagcttaagcatgggcaaatcatcaggttccggcattcgcttccattgccaagcaaagtccatgggcgttacccagccatgaacgctaaggctttctatcagtgctgaagctgcatgctcttgctgaggcagcacttgcttaatccattttgccattgtgatatcaaaccagcgccacagccctccagttctgctcgtaacacttcgctgtgcgcgtttctgatgtaactttaactccagcagcgcatgatacgcaccaaggctcagcatctcgtcaaggacatgaacgctgtcagtattcggagtcaagaagtggaagatgatggatctgcaggacagcgatacgattagaccgagagtaactggagcacgaccgcgtgaacgctgcctcgaaacgtacccttcgttgcctagcatgaagtccagcgctttcagctctgttgcacgcagaggtgtgcctgtgattcttgccgccacctcggaaagtgcttgaagagataatcctcccgaacgtgttgggtcaagtcgacgcagttcctcttggacgctcgtgtgacgacatctggagaatccatacagccgatgcaacagcgacgccatcggtccttgccactcacgagagacgtccatcagctgcggcgtattagagcctagaggcaaaccattcctgtggctgagcgtgtgatcctcctgtagagctaaagcgctggacacctcagatttccggcaagtgccagcagcaaagtgcaccgattcgagatactgattggtgaacgctcgagccggcttcgttgcgttaaaagcacgtagattcttggagcactgaatgcggtcgatctcttcgaaaattgacacaatttccacagcaatgtctgccggacacgtcttcaacgccagtttaagctgacgaatcgcctcgacaaagtcttgtgaccgggccgaggcaatgcccaggttgtaccgcgctttccagttggacgggtcgaggcgtacgcagttgcgatatgattttacagcttctgtgagatgattgaactcaagatagatagatcctgtgtccagatacatcgaggcgaggttgcacccgcgtgggtcgagccaaatgatctccagtagcaaatacagcgcatcgacgagatttacacgttccccggactggatcagtatgtgggcttcgcgtagagctgaccgccaggtttttggcgtgactcgtttctcttggaagcgggtggcgaaccggtgttcttccaaagtcttgagcttgaaccgttcgcaggctgggttgtcttcgtcttcctgaatcacatctctggcgatggcggactggtagtacgctcgcttggactcaaagcgagccgcgggcttggcaaccgaacatttggacgaggtgatagaatatgtcgtgcgaaccgaggcaacggagcaagttccatcgtcagaggctggtagggtgcaaagcgaatctgcgccagccatgatgtcgtagccatcgaggaccaactcataccgtaccgtcaacgagcaggaaaggagctgacacaggtccgtgcaaagcttccagcctgaggtaaactcgctgaatctttgctggactcgctcgatgctgctggcacctgcatctagctgcaaaaccagagtggttaacgcaggggtggagtgtatcggcggatggatgccggccccatcaacaaacctgctgtgtaaacttcagtagcaatatactcccgctcacaagcgagtgtagcagacgcacaagtgtatgctgaaggccaagcagtgcagattgaagtgcgtcagctcgactctagacaacaaggaaccaaatgtgacgaggataccagctgatggatcgggaggttgcgcgtctgagcttcgtcgtcgacagcacgcagcacgcgcaacaccacgatcttgaacaacgcgctgcctgccaccaagtaccaataccaacaagaacatgcgtgaggtcgtggagctctatgcagccataacgaaactcggtcggacgtgtggctagagctcgatgatgcagctccgggtggagactccagatctcccacagactcgtgagagcaatggctagctgcgagttctgcgttgcatactcaagttagattcaacaagcaaatcatggtttcgttacgctctcaccccgcgccaatggaaggctccccgcaacgcgctctctaagcgggcaaaaatgtctgctctgacagcataaccccgcagccgatgagagatgacgaggacatcagcagtgaatgaataggaacgcaccgatgaaggggaaggcggacgacattttgtctctaagctagttgaagcaagtattattttaaacatcgccgttaaaacggcaatgttttaatctcttggttttgattagctaataataacctcggttaagtacgacatttagttttttatgctcaagatttcagcgaacgcccaagctacggcttccttgctaccgacgcgcaagctgcgttgaagggctgtcctttgctcgacgaggtccagatccagttgtaccatccaaatgatattttccccatgtatgggagctggatccaaagcatcacgttccctattagcctctacacaatttacggctcgccctgtgcgctctgggccttagcgaacagctccttcacactctgcatcacaacttcgaacgtgtccgacgaccgatccttcagtccgatggccgccaggatcggcaggccgacaggaacgctgcacaagcacaccgtccgacaaaggaatcctctcgttagcctacaccaacaccatccagagccccactcagcggcacaacgcacccgaaatgctccaggaactgccgcgcgtacaccagcagcagcgggtcatcgcgccgcccgagacggacgtggatatcgggctggagcttgccgctgatcgaatccttctggtgcgcctccacctggcagcacagcaaacaaaaacaataaccacctatcagactcccatataaaacccttggtgttgcatctattgcagtcttacgagcgtgccgaaggtgcccagctgcgtcgctacgatgaagacgcggtccgcgaagatggagacggcgatgtccgtcggcactccgttgatttcctgcgcacagcagcccaaaaccagtcagctacaagctgcaacacgccccatactggctctgctctctctgttaacgccccgtaccttgcgctccttctgcgtgtgcagcgccggcggaggcgccacctcagccatgatggtcaggagcaataaattgccaattgattgtgagtttggttcctgacacgcattatgcagttcgagaggtccaacatatgcaaatttggaggggatgagctgatgggtccttccgattggccgaaaagaaattgcgcgggttttctggtcggctaatacagagactggcctcgtcgagagaaggaagcgcaagagcccgaagagaacgaacggccgtcgccacggtccccgtcccgcgccgcccacagcttcagtcctgcaggtagcgcgtctcccccgtttgttgtgcgtgcatgtgcacgtcgcgcgggtcctcggccagaccgcgcgcaacgccgactcctgctggcgactgacgtagctcctcgttctaacgacgatgtggtgttgtgtgcacgtggcacctcggacccgcgcagatcctgttgcaatggacggatacgaccacttgttcaagctcctgctcatcggagacgccggcgtcggcaagagcaggtgagtctgcggtcgatgtgggggttttcggcgcttttccctcattttcgctcgctccgttgttattgttgcacttcgtagcatgctgctgcggttcaccgatgacaccttcgacgacaacctgcagagcactatcggtaagcggaaaaggacgagcattcgcgtgcttgaagtggcgcccggcctttgctttttttcgtacatccggactgggacttgacagggttcgtgggtgtgtgcaggtgtcgacttcaaggtgaagatgatgcaggtggacggcaagaagattaagatgactatttgggacaccgccggccaggagcgcttccgcacgctcacgagttcgtattatagaggcgcgcagggcatcgttctgggtaagcaggcaggagctgcgaggcgaaatgttgcggatgggtgtgcaggcttgatgttcttacgctgctgtcgctggtggcttttacatggtgaaacagtgtatgacgttgctcggcgagacacgtttgagaacctggacctgtggctgcaggaggtcgaggtgtacagcccggcgggcggacgcgacgtagtgaagctgctcgtgggaaacaagattgacaaggtaagcttgaccgtgcctgattgagctcttgcgtcgtggcgatggtatctaaatgtacgccaatggtggtgacaggaacgagtggtgagccgccgggaggcagaggactgggcgcggtcgaaaggcatgctgtttgtcgagagtagcgcaaagaccaagatcggcatccagcaagtgttcaacgaagtagtgcagaaggtaggacgcggcgtggctcgatttttgttgatggggctgactcacggacgcctactgtgctgatatggcgtagattctggaaaaccccgcgctcctgtccaacacggcaccacgcagtcgcggccggaagctcgacggcaaggcggagaagagcggcggcggcagcggctgctgttagagacacccacggttttgttgttgatgtccttcgacagtcagcggcggcgcggttgcgatcgtcttggccgttcttgcgtgcttgctcctttcctcaccgcgatgcaagaggcgtacaaaggacgagaagggtcttcgacgcgcaactttcgcttgctgccgccagtgtccggtcctgaagtgctgtgaatgacgtgtgtggcggaaacctgcaggaggcatgcgggggcgggcggagggagaggaggaggaaccaggaaaacggggccagcatcggccggccccacgcagaaacagaggcagagaggcaggagaagctatcgaaatacatgttccccacagcaagtatttcgtgtcgggcgcctgagtcagccctgcgtctgctcggccacgtcagtacgggtgggttgtccccttgcgctggctacagtagcgcgatcgacagccaagccatgtcgcaccgccatctacctaggtctccgatcgggaccaaggtgctcgaggcaccgccttgaaggcaaacccgcaacaggcgccagcccttgccactgactgccgttgctgccgcgttactcctccatctggctcggcaacattgcatgatcatgtgccacgccacgttggcgatttggcagtgtcaaaccgtcatgccagcaaggcctctggccgtccgccacgcgacttcgagccaggatcggcccggaagccgccgtgatgcgccgcaccgcaaagctactgtagccggcagcttaagcaaggcggcgacacaggagctcgcttgcacccatgcgatgccggcatgccggcagccgatttgagtcaaatcgcgccggcgctcctgcgcgaaatattgcgcgggcacggcttctacgcccgcacgcgccttcaagccgcgcgcgcagcgcagtcagccgggaagacgaaagcccagcgagagcggcacgccggcagacgcggcgcgacggcccaccgtcgcggtgatccaatgtggcccatgaccagcaagtggagagtgcttacgtacacagtctttttttgatgggggtcgagggggggtgaatgtgatatagaagaggaccaacggaggctcgcggttgcgaggagcgtagccgcagcaaacccgcgcggggtgcccgcgtagcagggccgcgcggtatttgcggaggcgggcccagcgacgagcattccagcgagccgagcactgttctcgccaggtgagagaatctttttatcgcaggagcgcagcgactgcctttgcggagcgcagcggagcaaagccatttcccgcggatgacatccgtcctgcgggtaggtcgtcacattgtggggtgatgggctgcctatacaaactccaagatatcaccgaaaatagactgtgtacgtaagtcctgccccagcaagtgggcctgcagcgatgcgacgctcggacgatcggtttgtgcggggcgtgttcgtcattggtggaaaaataagacgcagagacgggcctctcatcaaccattggctcacagcgagtgtccgattgcgatttcaagtcaccatcctacgcgcaaagtttcccctcctgcaagtcgatacccttcgcaactgaaagtgccggcgagcttcctgcaacaacatgcgagcttctcgcagcctgcagtgcgggatctctgctacgctctatgtgtgctcgattacgtcggaccatagcgttgcggaagggtacgggatcgcgatcgcgatttacaagatgtgctgctggcaatctagagttgccgccatgcgatttagacgccagccgctgggtctccaccaggtgcttcaatttgcacttgcttacggcgcatgtaacctcttacaatactacagcagatacagttcgtagctctctccaatgcaggtcagtagtgccggcagtgttccatgcagtacacgcgtagagaaccactactctactgtatccgatacttcgccaaaacccggagttgatgccggcgcggccgacttgccatagctgatcccgagaggggaaagatagcgggtgggataccgcccccagctgggcgcccagagaagccgcattccattacaaatcgcgagcggcactcgccgagacaggagccctccacacactagaaaagccgctcgcccgcgctccgtcgtcgcctccttcttctcccgtcgaggccctcgactcacagcgagaggcacgccacagacgcgaagagagaccgaccgaccgccctcccccgccccccgctccgctttcgcgccgtgggacgcaccgcttggcgccctttctttcgatattccggccggtctgcgtgttgcgccgcgtctcgcccttccttccttcccttctcgcagtgtagcaactcagggctgcagcagaccagaccagtccatggacagcggagcggcgatgccatgtcggcccggcagcgagaagcaggcgcccctcgtgaccaagcagaagcagaagcagaacagcgacaagaagcagaagaagatgcagccgcccaagcacagcagcaacacaagcgccgcgcctccagcagcggccgggacgcggcgctctcgtcgcgacagcaactgcagcagcggcagcggcatcgacgccgacgcgcggcggccggcgctggcctcggtctccgcctccgcccccgtctcgggcctgagcccccgactcttccgcgtgctcaatgaagccaacgcgcccgcgctcgcgatggacgcggccggccgcgtgacgttctggaaccttaagctcgcgcagatctccgggctgctggccagcgacgtcgcgggccgccccgtgacagagctggtgacggcggccaaggccgcggagctcacgcgcggactggagcaggcactggcggacgccgacacgaccgtgagagatgtcgagattgaactcaacacgcccgaactcggccggaacgtgacgctgctcgtgaacctgacggtggacgcggacgacaacgaggcggccagcgtcgtggccatcggccaggacgtcacagtgtcggccctgcaaggctcgcagttcgcgcgcgtgacgcatcaggcgagcgcgccaatcgtggagctggatcgcgacggacacattgtgctgtggaatcccaaggcggaggcgctgacgggctactgctttgaccaagtcacaggcacgccactggttgacctggtgcacgaagacttccgcgtgctggtgggtgaactgctggcgcgcgtggcttctaccaacacatcagtatcagagttcgagttgccgcttgtgacggccagcggcgcgcgtgtggagctgctgctgagcttgacgccgcaggttagtgtggatagcgctggcgccaccgtgaaccgcatcgtggccatcggacaggacgtgactgcgcgcaacgccagcgagatggagtacagcaagctggtggactcggctaacgcccccattttcggcgtcgacgcggacgggtgcgtggtaatcttcaacaaaaaggctgcccagattagtgaatattggccgggtgaggtcatgggcgttgacctggtgtcgttcttgattcacgaagactatcgcgaggaagttgctgcagtgttccagaaggcgctacgcggtattgagacggctaactttgagtttcctctgatcacaaagcacggccggaaggtcgagattctgttgaatgccactccgcgctttaatcacgctggcgccattgtgggcgtggtgggaattggccaagatatcaccgagcgtatcgtgcaggagcaagagtacagccgcctcattgacacggccaacgctccgatcgtgggcgtggacaagaagttccgcgtgactatttggaacaagaaggctgcaactattacggactactcgtacaagcaggctatcggcaaggatctccttggattcatcgctgagcacgcacgtgagcccgtggcagacgtgttgtccaaagcaatggttggtacagaaacggcaaactttgagttccctttggtgacgaggactgggagagtgctggacattctactcaatgccaccccgcgcttcgatcacagcggtaaaattactggcgtggtaggaatcggacaggacttcaccgaccagcgggcgcaagaggaagagtacatccgactgattgatacggccaacgcaccgattttcggtattgacatggacggacgtgtggatatttggaatcgaaaggctgtagcgatcacggagtacacggtgcttgaggcacgcggaactcgcctggttgagagttttattccgcacgactaccgcgctggcgtgtccgatgtgatgtcgaaggctatggaaggtgaaggtaccgctaacttcgaatttccactgattacaaagaccggtcgtcgtgtagatatcttgctaaatgcgaccccgcgctacaaccagcacggtgacatcgtcggcgttgtcggcattggccaggacattaccgagcgtatcgtgcaagagcaggaatacagtcgactgatcgacacggctaacgcacccatctttggagtcgatatgaccggccttgtaaatatttggaacgacaagtctgccgaaatcacgcaattcacggctgacgaggtcatcggtaaagacttggtgcaggaatttatttctgaaggctatcgatctgccgtgggcttggtcctatcacaggctctgaatggcgtccaaaccgccaactttaatttcccactcatcacgaagtctgggcgtcgcgtggagattttgttaaatgccactccgcgatacaatgagctgggagaaattgttggagtggtgagtatcggccaggatattacggagcggattgcgcaagagcaggaatacagccgacttattgacactgccaacgcacccatctttggagtggatagcgaaggtcgcgtgaatatctggaacaagaaggccgctgagattatgcagtattcaacggacgaagtcgtcggtgaaaacctggtggaaaagttcatcacggaggactaccgtgaagctgtcagcgcagtcctgtcgaaggcgcttgatggagtggagactgcaaactttgagttcccgttggtcaccaaggcaggccgccgtgtcgagatcctgttgaatgcgacgcctcgattcaatgaacacggaactgttattggtatggtgggtattggtcaagatattacggatcgtatcgcacaagaacaggagtatgcgcgcttgattgagaaggctaatgctccgatctttggcgtcgactcgaagggactgatcaatatctggaaccacaagtgtgctgaaatgacacgattctcgaaggaggaagcagttggcaaggatttgatgagctgggctattcctgagttgtaccgtgatgctgtggaagacatcctgtggaaggccctcgacggcgatgaaacatcaaattttgatgtcgaactgaagaaaaagaatggtcgcactgtaaacatccgcatgaatgcgacggcgcggttcgaccagcatggtgaaattgtgggtgtggtcggcatcggccaggacttgactgatcgtattgttcaagagcaagagtacactcgcctgatcgacacggctaacgcaccgatttttggcgtggatgcaaacctttgtgtgaatatctggaacaaaaaggcagcccagattaccaagtactcgacggctgaggttatcggtgagaacctggttgaaacgttcatctcgcccgagtataggcctattgtggctgacgtgttcagcaaggctttaaatggtatccagactgcgaacttcgagttccctcttatcactcgtcccggcacaagaattgagattcttctgaatgctacacctcgtaacgacatgcatggtaacattgtgggtgtcgtgggtattggccaggatattacggatcgcattgcccaggaacatgaatacttccgtctgatcgatacggctaatgcccccatttttggcgttgacacgtttggatgcattaacgaatggaaccagaaaattgaggagatcacgggctatcacaagtccacggttctaggtctggagttggtggagacttttattaacccggagaacaggtcagaggtgagcaagttgttgaatcaagcattaattggaattgatgtggaggagatggagcttcccatgacaactgccgctggacgatcgttgctgttgcttgtgaatgcttccagcaagaaggacatgcacggcaacatccgtggcgtgattggagtgggtcaagactacaccgcaaagaagcacatggaggcagcgaaggtgaacttcctggcttcattcagtcacgagcttcgaacgccgctgaatggtgtactcggtatgctcgagctactgcgcgaccagaagttggacaagacgcccgaacgctacgtgcacattgcttacatttcgggttcgctgctgctgaatctaatcaacgacatcctcgacttgtcgaaaatagaagcagggcacatggaaatttcagcagacccgttccaaatgcaggatctgctggagtactcagtggagatcttcaagttcaaggcgcgcgaaaagcacatcaagctcacgttggaatgctccccgaaggttccaaagcgcgtcattggcgacgtgagtcgtcttcgccaggtgctgctaaacttgctgtcgaacgctattaagtttacgaacgagggttcaattaccgtccgctgcaacatggtgccatcacctgaccttccgaagcattgcgtcaaactgctgttccaggtcatcgatactggtgttggcatggacgacgaagagaaatcgcgcttgttctcactgttcacgaagcttgaacgtacgcgcaagaataatccaacgggatctggtttgggtcttgcaatctgcaagcagttggtcgagctcatggacggtgatattgatgtggacagtgaactgggcgaaggctcggagtttttcttcactgttgtcgttcgtcgcctggaagaggaggaggacgatctcatccagaagtttcctgccgtcttagctgtcgatgcaaatgctactccttcgcttacagccagcaatgcgaggcataatgcgtcgatgtcggagctggtgccaaaacatgctcgtatcttggtggtggaagacaatgagtttaactgggaggtcgtcaagagcttcttcatggaagacaaccacctgctacaatgggagacgaacggcctggacgcgtatcagatgtatcaagagcatcatgattcctacgacattgtgctgatggactgcgaaatgccgatcatgaacggctacgattcaactcgtaatatccgtaacttcgaaaagcagcacaagcttgcgcgcattcccattatcggagttacagcgtacgccatgagtggggaccgcaagaagtgcctggacgctggtatggatgagttcattgtcaaacctatctcaaagacggagctgcgaaaggctattcgcaagtggatgcgtgttcgattcttgggacagcactgcccccggccgtcacgagtcgaatccgtgatcactgctggagaagattctgctgctacctcatcttgccaaaacgctgccaatctggtagctgcgtctagacacaaagaaaaactggatttggaccgagccatctcagacctagagctcgaggatccgatgatgatcggccaacctggtggaattcagacagcagcaggctcagaagccttgctcatgtcgctcactaccatcagcgaaagcaaaagtaaccaatcgagtacaggaactcttggacgcactctaggtgctgcagatggccagaatgaagcacctgaatcgtcaactacgaccaaaccttcgaatggtgcagtggcgcatcctggaaacctggtgaacgcatcgagtattgtgggtacgaatttgtttgccgccgcgaaggcagcaggaatctaccccatgaatgcagtcgagccccctgctccccgctcaccttcgtcagctaacgataccaacaatcagcacgacgctggtgatgcggccagctcgacaatggtagtgaacaaggcggcacgagcatactcgtcgacaatggcgcctgaagacatcgtgataccaactggtgatcctatcgattactcgctgggtgtggagcagtgtggtgcaaacgagagtttgttcgtgagcctgctggagaagttcgcaggtctgagcgaggagttcatgaggcgtatcgaggaggcgtatgccagcagtgacttcgttgtgctgcgccgcgaaagtcactcgctcaaggggtcgtccgcctacgttgcagccatgcgtgtttctaaggcagcattccgtgtacagcttgctaccgagcacgtgatggaggagactgcgacggcagagaaccacaactctctgaaggacgccttcctgttgctgaagaaggagcaccgtgctttgcgcggctatcttcgtcggaacttttcgttccggacgaacgctggaagtggcaaccaggacaccaagaagaagagcggtagtaatggagggggaggtgacaatgcgtgcattgtcatgtaaatctgcggacaaagcggtggtatatttgcttttttttatataaaatcggcgacgaagcagtggaggcaaggagaggatcgatagaacgctccccagcagcttgtccgccgcctccttcattgcgccgcagaaatgtaacttataattgatagtcgttgttgacggcggttgtttttgatgctggcgttcagagtccttgagtacacactcgtcactttgactgtggcttggcatcgagaaagtaggcgtcctcgatgtcgttgagcagatcattcatagcttcttggaacttggcgcacaccagcgtacggtttgcgccaatttgttcagcgaagcgtgacagtttgctgcataacacacaccaacgttgcgacgtgagggataccatagaaatagcgtggagctacgaaagagacttacactttctgcatggctgggagcagttgaatccacgcggcaatgtcgtccagcgtgtagtcgtgctccttgatgagctccttggcgtctttgaagtaatgttcagccaccttttgcacgatctcgtccacctcagcttgctccttgctctcatcgtcgacgtttttcgcgtcgacttcctcttcatcagcagttctcctactgcccggacttggcgttgctgtttggtccccacagtactgcaagatgaactcgtgcttcagcagttgtttaacactccaccgctcagtttgatctttcttgaggcacttgtcgaggaaatcgcagaacagatccgagaattcaccctcggggaggcgaggaggctagcaaagcaagcaaacaaacaatggtcagatacgaacgtacaaaattcaagaagtgcccacgcaaaagagcgtacaggttcattgcggatcatgtgcagcagttcccagtatccaccgcgcgacgaatatgggaacttaccgagagcacaggtcataatggagagtccgaaagaccacacatccgacttgtacgagtactcctgaaaagtacaaagcatttatacagatcaagttagtatcagctggcctgaaggagaaatatgcagcggaagttgaatctgacctcgctggcgatacgctcgggggacatgtaggtgagtgtgccgacgaacgttgtggctttggccatagagttttccatttcgcgcacgatcccaaagtccgagactttgacatcaccaaaatggttgatgagtagattgctcggtttgatgtcacggtgcagttggtgtgtgctatggagaaatgccaggccctttaacacgcggaaggagatgttggccagcaccacctcactggtacagcctccagtgtccacgatgtcctgaagcgagccgccatccatgtattcgaccacgatcgagacgttgccctcgttcgggttcatgaaggcgtcgtagagacacacgagctccggacacgccacgctctgtcgggcattctccacactctcagcatccggcagcgtagacagattgttgtacagcgcctttagctccgcgatcaactgatgtcttttctcgtgctcgaacaccgggatgactttcacagccacgagcatcagggacggaacgtgaagcgccttgtgcactactccgctcgctccacgaccgagaacaccaagcttcaccaaatgtttcttggtattgggcggtctgtcggaccgagtgctcgaaacgccatcagaatcccgatctggcgatcgagtaagacccgtttgcttgatctggaaccccaccgcgtcgaatgtccccgacgcggacaagtcgtacgagcgctccagtcgatctgtgctgccactgtgcaagtctagctggaaatccgagcccagaccttgaacaaagttgcgttgaatacctttcttccctgtggacgagaccttaggtgaagttgaagtcccaggcctagcgaaggcggtcggccccgacagcttcggacttcttggtgcctgacgacccagagctccttgtccagaaggacagtcaacatttatcatcggttcgagatccgcgatctccagtttaatctgcgcaggtcgtggccgaccaccaggcgccagtcgcccttcaccgctcttcttcttctcggccactctgggtttacgacccccatcttcagctgcagcagcagcgtcctcgggatccgtccgcatagatcggatgcgccgcatatcgttcgcaagagactgcacacttcgcgctgtgtgcagtgaaccgtcttgggagtgttcgagcttgctctctgctcgtccagccatagttgacgacgacgagtttcccgggcggtgccgatccagaatcttcacttctggctgcttcagcttggactctttcataccagtcgccttgttttcggcgtcggcagggtgagaggctctgtactcgcatacaataaaatgttattattctccgtatttgagcactatggacagcagatacgaacatacgctcgtctctcatcagcaggagtgtcgagccgcgacggaatggaagaagactgcgccgacaggcacacatccacagcaattgagcacattttaacccttatcgatgatacattctgttgctggagctcacctttgcctccgccttcgccttcgtcgcctgctcaacacgttcaatggtaccaagccatatcagatcgctattacaccgagagctttcagtattgacggggaaggctggtacgcaaccagcactgatgcacccacctgaggcttggcctcccattgctcgtcgctcgcagtcgccttcatcatggcttcgtctctaattgcccagaaggtggtggtctaacccgctgctgcggaggccgttacgcttgaagcgacgcgaaagatttcgatttgctaaaccaagttgaagttgtctgcacaaatggctacatgtagccatttgttggccccaactacaggtgcagcatgcggcgcagctccgtgacgcgatcccgagggtacggcgggcgctgggccacgaagctctcggtggccgatttcctggcgctttgctctttctcgacgcagaagaggtcctggacccgctgtacggccgcgagcttgaagtccttgggcttgggcatcttgccgctgtagacggcctgcttgatgtcggcggtggcgagcgggatctgcttcttgacgaactgcttgccctctttggtctccagccactcgcgagccgcagccacagccgccttcacttcttcgtccacgcgctgctgctcctcagctttacgtcgcctctctgccagctcgatcgtctcgcgccacagcttctcagccgtagggacaaacacagccgacatctccatcacttcagcgagctgctcctgcacagccgcacagtctcgagctcgaacgagatcttcgttgcgcttgatactctgcatcttcatgcgtaggttgcacgtcggattcacgccttgtagcagctcgtacacggtgagagtcgagaggcaattgttgcgctcgagctgacgctgcgcaatgtccagcggctgcagtgcaaaacaaccagttcgttagctctcgtcttacagcaagtagcaacaatctaccgacttaccttgtggcgtttgtagttttcggctgagaaggcgacgacgacggcgtccgtgtgcttcaagaggtagcgcagcagcaggacctgcgagttgcgagcgcaccagtgcaacgcgttgtctccatgcgagtctctgcgcgctgtgtccgcgccagcttccactaacaaccgcaatatctccaccctattagcgacagcaccgagcgagttgcggcacgtcgcgatcatgggcgttgtcaggctgtagtgcgtgtcgacggcattcacagcctcaagacagacctcaggggtgaagtggctttgcatgaactcgaccaagaagcgggccaccgcgacggaccccaagtagctcgcctcatgcagcagcgactcgcctcctcctccaccttcgacgctctgcttggccttgcccagatagtccttgcgcaagaagaaccgacgtctgtcctcctccaagaacgtcttgactgcttgggcatcatctgctgtgatgctgacccacacgtttacgaacggctcgggcttcttgctgcgctctgcaatctgcttcgagactgccgcttgagccgtcgacgcgagatccggcgctcttgacctcggtcgctgctgctgttggggcccctctcgctgctgtttgagccagaactgctcggtctcctccttcaccttcagagctttctgcagccacggagtgtatcgaggcacgcccttgccactgcgcaccgagctgcccaccattgtcaagatgtataaggtgtccctactggtagtggcggttcgtgaacatctaaaccagaatgaaccaacctctctattcaccctctaagttacttgtacgtctgttgggagattttatcgtgcggcacgcttggcagctaccgtttgggtgatctgagccatcttgttgaagctcgtgccgatgacggcgtcgcccgtcttcagattggtatggttgggtagggatcgagtggcgttgcttgccagttgacccagactgagcgacgccttgtactgcagctcctcgtcggtggatcgggcacgcgcgatgcgaagtagcgcttgaatgccgccctcctcggcgatacgcaggtggttctcgtagttgtcggctagtttgaggagagcgagtccagcgtagtggcgtggctcggcgtgcacggacatcatcgcgataagcggtcgaagcgcgccacgctcgacaagacggacctggtactcgcggttggatgcgagatgggccagtgtgaaggtcgcatactcctggcactccatgtcctcgacgcaggccaatgcgatcgcggcgtccaaacctccttcacggtacagatcgtcgtggtagtcggtctgttgctccaccaccaacgccaacaagtacccacagttcctcaacgtctcggcgtcgatgcacttggtcaacgctatcacgtgcgcgagagtacccagctccaccagcttctgcagaacgtccttgctctcggccagcgagcccaaacagtaaagcgcacagcggacgcactcctcatctgtcgacgccagcagagctaacagaggtagcagcccaccactttgcatcaccgacaccttcgtcacgctctgcttccccaaagccaacgcgttcaaggccaaacaaccacagagctgcacgtccgcgctcggataccggagcaagtcgatgagagggggcactgctccttcctcgatcaggcgcagcttgttgttgcccattccccccagcgccagagctgcgagtgccaacgccgcgtaccgctgaatttgagcgtcagggaagcgaatgaggtgtgtgagcggtcgaatcgcgccttgctccacgatgaaaggcttgtcgtcgcccgatgacgcaacgttgcagatcgctaacgtcgcgaacctctgcgtggccacatccagagaccgagtgaggcggaagagtgaaggcagcgctcctcgacgcaccagatcgggcttgatcgagttggtgatcgacaacgaggcgaagacgcgtgcgcagtcacgctgcacgcgagcgtcgtcgtgcgcgccaacgtttatcatggcggagatggcgccttcacgcaccacgtccagttgatgctcgagcgagtctgcaacattcgccagagcgaaaacgcagtcgcgcttcacctccaggtcgtcatacgcacagcaacgtaggatctgcgccaaaccaccgtcgcgaaccagcttgagtttgttctcttcgttaagagagaagctagagaaagccgccgctgcagtgcgttggtagtcgagcagcggactttgagccaacttgatgaatggctgtagcagggattcttgcacgatgtacactcgaatggttgggttggccgacaagaagcgtaagcccatggccgcatatcgctgcgtgatgtcatccgccgactcagttagctggataaggcacagcagcgcgccttgcttgtatactgcaagatggttttcctcattagagcagaggttggccagcgcgcggctgacgtcttgcagtatctcggcactgtcgggggcgaccttgaccagcgcgacaagggcactcgtcaaaccttcagccacaatcttctgctggttcgctggatgctccgataaattcgccaccaacccagcacactggcactgcaagtctcgaagccccttcgcgccaggatttgtgctcatgcatcgcagcactgggcgcagagctccttcttcgacaacctgctgcttgatctccgggtgtgaagctgatgatgtcaggtgccgtagcgctgcaaccgctggagcttgcagcgaggagttcacatcccgtaggaatgtaatgagagccttgagaccaccttcttccacgtacatgcgtcggaactcgctgttggctgctagatcacgcagtgccagcacgctctgtcgacgcgtattcagctctttagcgtgcagtaggaagaacaatgtctttagtccgccttcgtacaccagtccgcgatgactagcaaagttcggtgcaagcttccgcagtgctagtgcagcattatactcacactctggatccagcgagagtccgagatgaacgaggcctgggatgccatcggctatcatatccgtgtggtgttcgaagcttgagagtagatttgcgatcgtacgcgacgcctctcggtggatttcttcgtggcggtgcttcatgagggcgatgaggaagttcccgctgcgttccgccacgaaatgggagtgtgtgtccagatgctcagcaaggttagccagggcaccacaagcttgacgagcgacctcgaggtcaggcgactgcgccagtttgatcaacgggcggagtgcgccttgctcaacgatttccaccttgtactcgtcactgagagataggttacagtacgtcgcggccacttcgcgctgcgtctccagctcctcagacatgccagcgatagccaacggagcgagcccacccccgcgcacaatgcggccacgattttgagccgagaactggcacaagcgacggagtgcagaaaccgccagcgtgtgcgagttggagtcttctgcatgcgccagcataatgagcgctgcgatgcccccttcgtctccaattgctgcacattgagctgtgttcccagcaaagtttgccagggcgaaagccgcatacaatctgatgtcctcgtccttcgactggcccagccgtagtgccaccttcaataccccacgtccgatcatgtgatcgtggttgctctcgttcgccgccaagttagacagggccatgatggcaaaccgctgactctccagatcgtcgtcgtcttcagtgagcgcaaggattggtgcgagaccgccgtgaacgagtacctggacttgaagcagcggatcacaagccaagttacacaacgcaatgcaggcataccgacgcacactcggatctgctgcgtccttggcagccagcaagagtgcttgcaaccctccgccacgtggagcagctgaccgggtctcgctgtttgccgccaagttgcacagcgtcatggtggcgtatcgcttgcagtccccatcttttgcccctgcaagacgcacgagcgcagattcaatgcctgcctccacgagcttcagttggtttgcttgagcgcatgacacattgtacagggccaaggctgcgctgcgttgacactcgagatttggtgacaaacacaacgcccgtagaggtcgaagggcatgacgttccacgactatgaggcgattctggcggtgcgccgatacatttgcgagcgtcatgctggcatatcgagagcactctggatcgtgagaccctgcgagatcgacgagtgggtccagaccgtcatcttgcaccacgagatgcagttgattagccgggttggcagtcagattgcatagcgccatggccgcgtacttcgagcattccacactaggggatcgcagcagtgctaccagcgcgcgcatgccgcctgccttcatgatcttctgctcgttgctggagttactggacaagttacagacagccatagcagcacagcgctgaatttcctggtcttccgtctcgctgagtcgagcaatcagagcaggcaacgcgccagcgtccacaatgcggtgctggttttcagagtgagcactgagccggtaaaaggctcgagcagcgtactgccgtgtcgacgcaaaattgctctttagtagctcagatagagggacgaggccgccgagctccgagatttggtactggttgtgcgtcgtgactgccaggtttccgagacacatggctgcatcgcggccacagaactcctcgttgctgtgagctagcttgaacacggcacggaattcctcaagagaaaagaccccgaggtggttctcaggattgctggacaagtttgcaaaggtgcgactcgtgtgccgcgcgatctccacgtgatagctggcttttgtgagctctagaagagctgggagggctccctcacgcaccatttggacttgattgagtacattttcactcagcgtggccatcgctccagcgcattgaagtcggacgtcatcgtcgtccactgcacagcatgcaaagagaggaggaagaccgccttcgtgcacgaactgagtcttcaccggcgcgtacagagccaaatgccgcactccagcggctcccatggtcttgagtgtcgcgtcggcactccgtagcagtgagatcagtgccaacatggtcccgccgtcctcagctagcgttggcttgttatctttattcgcagtcagagtcttgagagctgccgctgcttgacgctgtacatccagcccaggagctccaagcaacatgtgtagcgtctggaccgatccactgcccagcatcgctcggtgagtatcggagttgcttgtaagcttgtgcagagcgagcgccgtgttgtattggcactcgtggtcttcaatcttggcgacgcgagctcctgcagtaaggccttcctcgttgagcagcaccgcgtggaattctggtgtactcatgagattggcgacaagtctggaggcttcacggtacaccggaaggtgtcgacttcgcatcgccttcacccccacgtggacggcgtgaacgtcgatcatgtattcatgtgtgcgaatattctctgcgaggtttgcagcagcgccacaagcattccgagccacttcaacatcaggagacgtacacaacgcaaaaagctgctggaacagcgctggtgaactgctcgccaatacgagcttgttgctttgcgccagacttaaattacacagacacgctgccgcttcacgctggttctccagcagttctgtgtgccgcgcgcaagccagaagtgctgccgaaagagactcacgatgctgtgacaccatggacactcgattcacatccagattcgtaatacggcgtagcacagacactgcgtggcactgtgcacttggatgcttagcatcttcagcatcgagcgctagcttgattagaggcccgccgctgtcgctgagctggcctatgagttcatggagtgactcgttcgtagctatcttgcccagcgcaaaagcggcgtagaagcgcgtctccatgtcgttagccgtgtccagagccgcgatgagcgcaggaagaactccgttgtccacgaatggttcgtggtttccttcgttcgtgaagatgcaaccgagcgcgagcaatgcaaactgtcgaggttctgcgtgctctgtatcgcaggcaagctcaataagcggcaccaccacttcttcgcgcagcactctcgaatggttttgcgggttcgacacgaggttaccgagcccgaccacgccgaagagtcgagtcttcgggtccgggtgctgaatagcgcgaacgagaaattcgtgacagccgtccgctagtaacaaatcatggagcgcgtagtttgacgagaggttcgccacacacttgactgcttcatgagctacccgcgctggggcaccctgtgcctcgaactccagaaagaaccgcaagccgcgttgctccgcaatagcgccatgtgtatccgaattctcagcgatgttggcaacgcttgcacaggcgaacgcagccgtgtcttcgtcacatgagagcatgagcgtgatcagagctcccatcaaaggtgatgcagcaatgatgagcttgttcttctcagcaagggacaagttgtacgctgtcatggtaacctctcggtgcagctggatgtcggaagagcgcgctcccagcactaaaggctccaatccaccttctgagacgatatgtaatcgagtttcaggccgattcgagagtcctcgaagtgctgcgatggcagttttttgatcgttcacgtcgtcggagcaagccagctgaataataggaggcaggcctcccatagcctcaaccatttgtcgtcgatctgggttggccgctagattacacaaggcgaaggctatgcagcgatgtgtctccaggtcgacgctattagccacttcgactaacggcgacactgcaccagccgcaactaactcgtcttgaaactcggtcttcgcagcgatattgcccaaggtcaccgcaccaaacaaccgatatgtagcatcggcagagcacaggaacgccacaagtgactgcatctcacacgccgcaatgaatacttcggggtaagctccaacgcagccactgagggacaaattgcacaagcaagccagcacttcttgttgtacgtccatatcctccgacttggtcagcgctaacagtgggcgcaagacaccacggcgtacaagttcccgtcgcgctagctcgttcacgcataatccacgcaatgcacaaacagcacgatactggcactttgcgtcctgtgactccagcagacaaagcaaagcgtccaggaaagagtatcctagctccagaagcatcgcgtggttctctggaaatgccgtgaagttcgcgatgccgaacgccgcgccattccgcaacgccatatcagcgtgttgcaacaactcagcaaacaacgggagcactccagcatcgacgagcacggactgagtagtacgcacactggcgatgttggtgagcgtaaagacagcatacctctgtgtatcgagatcaccgttgagtgacccgttagccagcgctacaagggtgggcacaagcgcatcctggacgatcttggtgatgttgtcaacgttcgtggagaggttggcgatgcccatcactgcgtaccgttggctgaggaaatctggtgcatttagcgctgccatcagcggcgtcagaccaccaccggatacgatttccgctgtatacgcatactcggctgacatgttggcaatggtgcgaagagcttcacgctgaacgtccacgctctttgctcgtagcacgaacttgatgtgctgcaagacaccatccttcaccattcgtccctggttttcgaccacttccgccaagttggcgagtactccacaggcttgatgagctacttctccgtctgctgagtgcaccagtgttagcagaggtgccaaaccgccgttcagtacgatgacaactttgttgtcttcgctcagcgataagttgcgcagcgcagcacacacttcacgctggacttcgacactttctgagagggcaagtttgaacagcggggcaagagcaccgaacgacacggcctgggtgcggttcttcgcctcaacaaccatgcggcgcagcgcaaagcaggcctgtagatgtgtatcctcgtccgcgtcgtgcagtagcgcaatcacagtgcgtagcacacccaacttcgagatttgcgcgctgttgctttcgttggctgctaagttgttgagtgcaaatgccaatgcccgacgagtctccagatccgtagccttgttcactgtcatgagtgctgtgacggctccttggtcgaacaaatcacggtggttcttgggatccacggcaagattgccaattgccagcgtcccgaatcgtcgacacactacgtcctctgtctcgtgagcgaatgctccgatataacgcaatgcgttgctgcgcagaagtgtggcctgactcgatggtttggccgcaaaaagggccagacaacgagagacttggcgtttgacctccaagtcggcaccagttgctagcgcatacaaaggtgttaatataccttcttcgagcattttcttatgcgtgtgcccttcgatcatctcagccaaattggctaaagcacacacggcttgtcgttcacggtacgaatctcgactgctcgccagagcaatgagggccggtaggcatccaccacgagccattgtgatcttgttctcctcgctcagcgacagattggagagtgtagccgctacctcccgctgcacttcaatactctcactcgaagctgcaaggatgagaggttctagagcgccaaggcgcacaacttgttgacgcaccacttgattcactgaaagtcctcggagcccggcaatggcttggaactgcacattcgcatcccccggaaaagcgaaagagatgataggctgcaggcagttggccgctacgatgcgctcgatgttgttcgggttgctgcacaaattgccaagagcgaagatggcgaactgtcggcacttgacgtcgcgatgcttggcgtaacctgccaggaaagtcagcgccttgtccagcaattcctcgtgtgtcgaaggtgacacagccagattggccatcaccaggagacagtaccgaataacgtcgttgtctgcaagtgagcgcgggtccagtgcttcttcgatgcgagcaagtataggagggagtacaccttgagccagtagcttgggttggttgttcacatttgtaccgaggttgcaaagcgccatcgcagccatacgctggcagtccaccacttcactgcccaggagctgcacgagcggtggagctgcaccttgacgcaaaatcacctcagcaaagtcacagttcgctgatagatttccgagtgcacgagctgcctcacgctgcgcgatgataccgccatgctgcagagcatccacgataggcgggatcgcaccgttagccacgaggtggctctgattttcgacgtcttcagccaagtttgcgactgcacaaagtgcttgccgctggacacccacatcggcactctttagcgctgagaggattggcggtaaaccgccacacttgcagatgtccgatttgttcgcgtctgcaaacgacaacgtgcagatcgcaggcagtacatccgcctgcaagtcggagctctgggttcgtgcaaggaaaagcacgggctccagtccgccctcttcggtaatctgcttgcgtaggtcagcgttgagcgcaaccttgaccaatgcgaaagcggcgtactgccgaacttcttcatctggagcgctggacagcgagataagcagcggtagcgaaccttcttcgacgatggcgcggtggttttcaacacacgtagcaaggtttgcaatagccagaatagcaaaccgctggatctctaactcgacgtcttcagacctcgcgagcgacataagaggttccatggctccactttccataaggagctcccgcatagcaggatttgtggctagattgcaaatgcctagcgctccaacacgttgagacgccatatccggtgacagcaagtacgagatcagtagctggtgaccgccgtgctcgataatgtcctcgtggttgagacgaaaggctgacaggtttcctagagcgcgacctgcctcgcgctgaacctccacgaactgggagcgcatcatggcaatgaggggagggacacctccatccgcgcatattttttcttggttctcttccacctcggccagatttgctagcgtagcgcagctttggcgcgcgagatctatgtcttcagattgtgcgtgagcgatgaggggtgccacagcgccactcttggcgatctcatacttggtctcctcgcttacagacagattgcagagcgctgcacaagcttcgcgcaagatctccaggtcgtcggactgcagtaacaacacgagaggctccagtccgccttcctgcagtatcttgatcttgttcgcctcactaaccccaagtccgcgtagagcagcaatggcttgatgatgtacgtcggtgtcttctgacgatgccaatgtgataatgggctggagcccgccctcttccaccatacgcgtgtgattctgctcattcgacgcaaagtttgccaatgcgaacgccacataatactggctcagcgcatcagccgtgcttgccagggagaacagcgacagcagacatcccgcctcaacaagcgcagggtggttagctttcattgctgccaggttggcaatcgcaagcacagcgtagcgtcgggcttcaagttcgcgatcaaacgcttgggcgagtgcgatcagaggtttgatagtgcctagcccgacaatttgaacctggtaactggcagtagtgctcaggtttgcaagtgccagtgctgcgtaacgctgacaaacgtggtggtccagtatgagggctgctgctagaggctgcagcacaccctccttcatcagcgctggttgcacctcttcattcgctgtgagattagccagacatcgacaagcctctgagcgtgtgttgagatcccttgctactgccagcgccatgatagacgccaaaccgttctcgcgcagcagtttatcatgaagctcatgcagttccaccagattagcgatcgtgctgcacgcgtactcttcgacagcaggatctccagagagtgacatcgaaataatcgtgagcagcgctcggtccgagatctccgctttgttttcaggcgtggctgaaagcgcgcaaaacgccgctgcgacttcacgttggatgtcgggctcgtccgagcgtgccattagcaccagtgggtccagcatgccttccttgaccacgacgatacggttggcgggggagatacaaatcccacgaagacacgctaaagactgtcgttgcgcgctcagctccttgcagcacgccagagcgataagacgaggaaccgcaccttcgtcgacaatcaggggacgatactcgttattcactgacagattcgccagcgcaaaagcgcaatatactcccgaatggaccatttcaggatccaatagctggacaagcggctcaatcgttccaagctgtacaatctcctcgtgattctccggctcagccgccagattgccaatggtcatcgccacgtactgcttggccactgcatcgttctcgttctcaacgtccttaaagaatttaacgagcggtggcagggcgccttcctcaacaatcttgactcgactcgctgggcatgacgcaacattagccagacacaagcacgccaaccgaagcgcttctgggtcactcgactggagaatgagcgtaagcaaagcctttaccacacccttggataccatcttttcgtgtagctcagcattggtagagatctcagccaaactgaaggcaacatcgcgctgttcggtcggtttgcgttcgcgtcgtccgcgcgcgattagctgctcgagcaccttggacattgtgcctggtctgagcggcgagcccagctacttgagcgacctcctaaaagtgaggcataggtgccgggtgtcccctcgtcagcaaaaatggaaaccgtcaatgaacatattggggtcatgagttcgtgttcacaatcacagatcccggatacatgctacctcgttactcaacaggatcaccaaactcctctgcaatgcgctgaaggtggtaacttctggcgtcgggggcgttcttgcagtaaaagttcgagatgaaggcttcaatctgctcacatcacaaaacagtagtcagctctcggtactctcctttgcagttgctgatctcaaaacataccctcgatcggaaaaacgacagcgacgagctcgtgatgtgcacacggcagaattggtggagatcggtcctatgaaagtcatcattgcaaggggtcagagcaatgtcgccaccatagcgccagtacgaaatagagtctgttgcctaccagtgcggcttatccgagtgtgctttgtacacggcaaagtcttcgaggacgcccagagactgaaaagactcgttcttgacatacacgtagaacagctacaccaacacatcagaattgttatagctatcaaccacgagatcagcgaagtaaacgtacgcgattctgcttgtcaagtagtgagtcttcgatgtactcgacgaagtccgagctcgcgaaccgcttgattaaagatggcgcctcattcctgcaccgcagccaaagcgaaaaaaaacgtcagttggtatcgccacgataaatgtctatcgtagcataccggaatcgtagcaggcggcgcttgaagacagcgcaatactcgtccaattggcgctcttcaagtagctcgatcgaatccaatagccgactggccgggtccggcaatggctccttgaatttgcggtaatacacatccgccgtctgaaaacaagttgcagcagcacagacagttttgtcattacaaactgatacacacaattttgtttgcgtggtacgcacctgctcgactgtgtatggaattgtggcattacagtcgccaaactggaacgcgtcagcgtcctccggcagactcagcaccaagcgaggaacagaattccccgcttccggctgccgcacgaccttaatcccgtgctcacgaagaaacacattcagctccgactccgccggtgctcggcgtcggcgtcttcttccacgtgtgcgagcaagcggtgcaaccgtcgagacccacagaccttccggccacgggaaactctacagcaagaaatggttaacaccgtccatcagcctcaacaaccactacagtagaaaaaccactacgtagctcaccctcgagcgcagcgcaaccacgatcgagtagcccacagcgaaccacagcagcggcgagagcttgtggcccagttccccgtactgcgccatctcgtccgggacctggtaaacagcagcgaaatgccgactccagggcagcgccaccttgaagccaaagaagagcgcggctccagtcaccgccagccacgacagcagccaggagacgcctccacctcctctgacggcctgttgtctgggtctctgctcgtgcatcggcgcccttgcaactgtcggcttgggcttcgacttcggctcagcgtcctccgccgcttgcaagctcgacagcagcgtctgcaccagctgcacgtagcggcgcttggcctcctgcgactgcgtgccgcgcagctcgtgccagctcgacctaaaaccgcgataaaatcgtgtaaaacgcagcgaggtggcagttaaaaccaggggctaaatcgctcctaccatttggcgcgctccacgacgcggaaggcgctgggcacggccgcagcgcagtcgcccgccgtcgcctgcttgaacagcgcgtacagctgcagcttctgcgcgtcgttgacggccacgcggccctgcgcgcccgccgccttgagctcctgcgccgcgcgctcgaacgccgccgccatcagcttcaactcggcaaaacaagaagtgtgcaccacaccatttgagcccgaccaaaattctcgctggacctttccgaatagtccgacacaaaccaccgcgtcgccgctcaaggcacgcgcctcgctcccgacaactttgtgtatccatcctatatggtaggataggataggtcgatcacttgctcattcattcgccaagtctcccgacagcgcgcaagtgaccatcactcctgccatggactccctgcactcgagcctgcaccaccccgcgcagcgcgcctggagcgagccgcacctgcacccgtcgcagctcatgtacccgctgttcgtgacgctgcgcgccgaggacaagccgatccgcgggctcgagccggagctgcagtggggccagggcgcggacggcagcttcgcgtcgctcgtggcgcacctgcgcgcgctcatggccaagggcctgaccagcgtcatgctcttcggcgtcgtggaggacaaggacgcgcgcggctccatggccgagagcgacggcacgcccgtcatcaagtgcacgcgcgcgctgcgcaaggcgctgccggagctgctggtggcctgcgacgtgtgcatgtgcgagtacacggaccacggccactgcggcatcctgcgcgacgtggacggcgagcaggtgctggacaacgcgcgcacgctcgagcgcctctccgccatcgcgctggcctacgcgcaggccggcgcgcacatggtgtgcccgtccgacatgatggacaaccgcatcggcgccatccgcaagaccttcaacgagaacggcttcgagcacgtgtccatcatggcctacacgtccaagaaggcctcggtcatgtacgcgccgttccgcgacgccgtcgagtcgacgttccagggcgaccgcaagcgctaccagcaccccgtgggcagcacgagccacgccgcgctggcctttgagcgcgacgtgctgcagggcgccgacagcgtcatcgtcaagccctcgctcttctactcggacatcgtggccagcttcgccgccaagaagacggtacccgtggtctgctacctcgtctcgggcgagtacaagatggtcaaggactacggcgactccaccaactcgctcgagagcgtcgtgcgcgaggcccacctgggtctgctgcgcgccggcgccagcgtgctcatcacgtacttcacgccctacatcctggaccgctgcgccaagtggtagagatatcagcgaaagtggtggcagccgcaggtagacgtagaagttgctagccgctctcttcaattcaatctgtcgtactctgagtagccaagcgtgacttttgtccattccaaaacaaaagagatgcaacaacaagctgcgcctgattgaggaaggagcagtgccccctctcatcgacttgctccggtatccaagcgcggatgtgcagctctgcgttggccttggggaagcaaagcgtgacgaaggtgtctgtgatgcaaagtggtggaatgttgcctctgttagtattttaatacatgtagctcgttactcgttgtgttgagccgggtaaggagctgaaccaagaagctcgtgatgcaaacgaacattagcttcggacaaagcaaccgtatgtcgaaggtcaaatcaaacaggtaggccctaccacgacagttgcaagggcgccgacaccggagcggagacccagacaacaggacgccagaggaggaggggccgccgctcgtgaaattctccaaggacgttgagaacgagaacgatgccgtggtgaagcagtacatagcgatgtccatcggcaatctggcggctgagccggagaatcccaaggagattctacggttcggaacgagtgagccgcttgtccagctattgaatggtccattcaggagtgaattgtgcttttgggcttcaacaacgaatgattgtcgatgaaggtgatcgcgcgacgacagtcattggcgtgtcttcgtggcccaacaagcccgcagattccagtatctccacaatatcctttgcttgtacagggcgaatcgaggcctcggcggtatggaacagtaggattttcctgcaaaactttttgtcatcgagcagcggatagtagaagaagtcaatagagttaaaggcagacgcgcgcaaaatgtgacacgagcccgtttgtagcgcagcactggataaatctttgggatcaaagaaggaaaactggccactgcgttgggtgttaaatagtttcttgagtttttggtcgtcaaaaatgcattgcgtctcaccaccgcgcatcagatctcgtgcacttttattccaaacaatgtccgcgaagtgccgctcctgtggaaacccgtcggagataaaagaacacttcgtcttggtattcgaaattgcgggaagcgatcttctccagcactcggagagagacaaactccgatgcgagttggacatcatacaactttgggttgtcgggtttgggtctgtagtggcacatccggtgatatgtaggccctccttctatattgctggccaagcgcttcagcataggtagtacgtcgataccattgatatcattctcgagttccgcaatcctgtctttgacgaattcttcgtttactgcgaggcagcatcgagccacaccaccaaatatggcaaaacgactttcaaccacattgcgcggcaccagcaaatcggggcgaagagaggtcaccgcagcaaccagttcttccacgtcccacagcggcatgtacagcttagtcgcctctggcttcttggacgccatgttcagccagtgttcgttcgggctggagaagcataccatctttgacggacgttctggttcatatcttggcggtccatcgtacaggtacaccaagtctgacttgcgccccaaagcatcgtcgtgtgcttggccgataggtatgtacgcttctccacaaaaagattccaccttgtcgtcgtctctgaacacaaccgctttcttcataatcgatccttgcgtgaatgatgccgtaatgatagtggtcttctttgtcgcggcaacttcactcttgtagcgctcgaagaagtatccatagaagaccgatttgcccgttcctgggcaacatatcagcgcaaaacaagtcagggcatctcaggatagcaacaggagaacagccttaacagtaacataccaggcgttccagtcacagtgacgatgtcgaacttttcgagcagtgtcaaaatcacggcgtagtacaccgggtagcacggacgcacaaagtacttgggcaagccgtaattgttctccatcggcaacaccgtaggaaaatctttggtctgccccgcgtccatggtctgctcccctgctgcgtgttggcgacaaacttggctggatggggggggactggcgtcggctgcaagtagcggcggtgggtaggtggatgaaaactcgagctggcggaactgtaacgcgtcggttaagatcggttgatggaagcggatttctgacgtttgttgcgcaaaagtatacagtcttcgtattgttgacccactgactgtggcgttgattttcgtcgcccccaaagacaactcgacaagtctcactaccaagcaggaaatctcgcggggcccagctgaactggactccgagagcgtcgacttgacgggggaaatgctggagaacatcccacaatacgtgtggaagacgtaggtgactgctatgtagtcggatgcatgcatgtaagttgaattgcacgctttgatctttgcctttgaggccaggccacgtcagtgattggcatccatctgcgacgtgtgttgactcatctccactatcgattcttttcatccaatggtatctcgcctctccccaacactgattgtatggccccctcggcataacctgaaccgagtcgaccgacacccggcatcatggaggcgcagcagctgacggacaagatcgtggccgtgggcaacgccatccgcgagctcaaggcggccaaggacgcggccaacgcggagcagatcgcggcgcaggtgcaggagctgctggcgctcaaggcgcagttcaaggcgctcacgggcgccgactacgcgccgccgccgcagcccaagaagcagaaggagagcgctgctgctgcccccgcggccgacagcggcgacgcccccaagaagtccaagaaccagctcaagaaggagaagaagctggccgagcaggcggccaagaaggccgcgggcggctccgccaaggccggcggcaagcaggccggcaagcagaagcagaagaaggccaagccctcggagagcgccaagcccgccgagagtgcggccgtgccgtcggacgccgacctgctgctgcgccagaccgagttccagcaccaggtgctgagctcgggcgcggccgccggcgcgcaggtcgtgaccccgtgggacgtggaggccgaggacggcgtggactacgacaagctcgtggagcagttcggcagcaccaagatcccgcccgagatggtggagcgcatggagcggctcacgggccacaaggcgcaccgctacctgcgccgcggctacttcttctcgcaccgcgacctggacgtgatcctggacgcgtacgagaagggcgagaagttcttcctctacacgggccgcggcccgtcctcgggcagcctgcacatgggccacttgatccccttcacgttcacggcctggctgcagaaggtgttcgatgtgccgctcgtgatccagctcacgaacgacgagaagttcctgttcaaggaccagaccctcgaggagagcgaggtcatggcgtgggagaacgccaaggacatcatcgcctgcggcttcgacgtcaagaagaccttcatcttcgccaacacggactacatcaaggagatgtacccgcagatcctcaaggtgcagaagtgcgtcacgtacaaccaggtgcgcggcatcttcggcttcacgggctcggacaacatcggcaagtcgtcgttcccggccatccaggccgtgccgtccttctcggagacgttccccgtcgtgctaggcggacgcaagggcctgcgctgcctcatccctcacgccatcgaccaggacccctacttccgtatgacgcgcgatgtggcgccgcgtattggctacctcaagcctgcctccatgcactccaagttcttcccggctctgcagggcagcaccaccaagatgagtgccagcaaggcgagcaccactatttacatctcggactcgccggaggatatcgccaacaagatcaagaagtacgccttcaggtaagccctacgcgctgattccttttgagatgatggtgtatattctgactgtgactgtgtctgggtgtttaattccacagcggcggaggtgagaccaaggctgaccacgagaagtacggcgccaacttggaggccgacatcccgtaccagtacctgtcgttcatgctcgaggacgacgaggagctcgctcgcattggccgcgagtacggcgcaggtcgcatgatgtcgggtgaggtgaagcagaagctgatcgacgtcatgtctgagtacacgctggacttccagcagcgtcgtgctgccatcaccgacgacctcgtctccgagttcatgagcgtgcgccccctagagttttaggcaccgttagctcgatgttttttgcaggccagactattgctttaacagtgtcatttctgcgtctgcatttgtatttgtgaggtgtactgttcagtattctccatgatgcagacgcgccggggttcaatagcgtggactactacagtgtcgacaccaccgagacgcgaaaacgcaatggagtattttttcttcgagagatgaactgcaaaatcagtgtgtcagcggtggtcttggaggagacggccttgctgcacgaatggtgaacacggacgaacgtttacggggtcacggatagcgtcggagacagcgagctccacacgacggcacgccaccagcttcattctttaatcattcgagacggtgtgagtgagcttgctcaaggattcaaaccacttgcaatgcacgccgccaatggggcgccagccaccaggttctggtacaatgcgagccacgcttgaatcacctagcaaatacaaggatgttacatttacaatactactagtacttgggaaagcgcagatacagtagtcagtcgtgtgctcacctcgtgcatacggaagcagttgcagatgcttcgtccaggcttgatcggatccgcgacgtacgggatgacaacggagacttgcgaggagaccactttctccggcggaagcagaaaaaactctctacatacaacattcagttcacaacgtaagtctggggacacaatctcttcgtcacaagccacaaatacgaacccttcgttctcaatggagatgccgaaatggcgataatcaaacgtaatgtacgtttccaggaagagcatcaggaggctgccgatgccagtgcgccacgtaacgcgtccattgcgggaaaagatgtagcaccatttcggctgcggcccagcctcactgggctccaaaccgtaggcgagttcttccgggaaatccagtgatgcgttttctgagtagcttctcctcctgccccctccgtacaatttgcgaacgctggcattcgcaaatgacttccgatgggtgtcgccacaagccttaaatagcaagcagatcgaacgcatcaggcaccaagtcggaccacgttcgggacacaagcgcagcgtacctgcaagaatcgaatcaccaggatcaccaacacgtaggaggagatgccgccaatgaacgcgcacttcaagtctgtaatacaacaagtccaggtcaagtcagcgtcagcacaaatacaacaagcagcaagcacttaccattgcggaggagatggcttttcagaatcaggaccagggggcgcaaggctggcatctccgcttggaacgaataaattaggtcacgggcacccagcccagtgtggccaacggaatgaccgcacgtgaggtcgagtagcacatcttgctgggttgggtcgatggagtaggtcatcttgagcactgggatcttcgcgcttcctagcagctccagttcttttgtccacggctggcgttccacctcggctgctagcgcctccaaaattgtcaaaggtttctctcctgccaacgatctcgcaactagcacacaatcgatgtcactcacaggcaatgctaaccgcgtgtagcttgagccataaacgtcaatcatagcatcgggccacagggatcgcaccagctcctgcagggagtcgatggcttgctgttggtgcatctccctcgatgcgagctgggcgtcgatatagtctacaaaaccttcaacttgctgactgagattgctgtcacaccaccaacatcatagttacaaagtcagctacaactcaatcgaccggtaatcactgcaagcagtacctgtgaaactgctcctcagtcacgtactgcgagtacggcgaattcagcatctgtgttctatgcacggggagtgaataatactgctgttgctgaggttgttgtagttgctggatggcctgtgctcgctgaagatcgacgccgtcgacttcactgaataaatacttcggattgcgacaaaacttcggtgaatcgccgttgacggagctcggcgcgctgtcacctgaggcgcactttcgcccacgcacgaacttcttgtaccgcggatagtgcttatgatgcgggtactgtaggttcacgtcaggatactcattctccggtgtcgcgatctctcgattcgttcggctgttctcgtcgtcatatccatttgctgtagtggctttgggtggcgaagactcgtggtgcttactctgagcaggttttgccttggtttgccggagaactgcttccttgaacagcatcttcccgccagtcgacatcggaacgccgtctgtctggttgtcgcgagactcggtccgacccgcaaaggaggccgctcgatcccgcggtggttgcatgtgaaatgtcgaagagtgtcgtctagcagggtcacttttaggcatcctgtaacagtcacaatgtacacattagccagagcataacaggtagcgcccgccgccaagcgagcgagccacctccctacctgctaaggcgtgaaaaggcaatcgcagaagttacgggtaatcagcacttacggagggttggaaggcgtcgacatctggcgttgtgggtagctctgatgggatcttgggggagcggcgtacttggctgaccaaatggggtcgtcgtatccagcgggcctgcaacacacagaaccaccacctcagttagttctacatcaaccttgcactttccgccgatcgatagtgtagtatacccacccgtactcgtgcagccccgggtagaacgcgcggatatcgtgtgagaagtggcacttgtcgccgtaggggcagccgtacccggacaggaacttcgagcagggcgtgaacgactgctgcgggtgcttgggctttttgtgtttgttgctgtagctgctgctgctgcctgcaggattgcggcgacccgctcccccagacaacgccatggggtggcggtagtgctgttgatgctgctgctgatgcagtctgtcttggtcgttgggcggcggactcggcggcctcgcgcctgctcttgctgggggcgtccagtgctgcggcatgtgctgcgtctggtcgaactggttggtgggcgacgtgaacgcgctcgccacgaccacttcgcctcgttgcattctgctgctgtgcaacgcgccttctgaatcagaaaatgggcctccgaagtgaggagcgagactgagactgacacggagcgagtgtcgagctgctgctgctggtggtggttcaaaaattcaaacgagtctagagcgagacactcggaaggtgcaggcagacagaacgacagacagcggagacgctgagagctgagaaaaaaggcttttcccctgagagtctcaggcgctcgctcactcggagagcaggccagtgtccgggaaggggcgcgatgtgctggccgttgaccccgagcgagcgactgaatgctagggctcaggcccaagaagatactgctgaagttgacgtttggcggccagttggtgtggcgcacacaaccggagattccatactgaaagcaagtgtagcagaaccttgagctaaccgcggtgtgattgatggtgtggtggtgtttgctacatgttgcctgcgcggtactcctcgagcttctcgagcgtgcccgtctcgaggaactcgtcgatcttggcggccgacgacttgcccacgcccttgagcttgagcgcgtccttgccgcacgagatctcggtctcgcactcgcggatggccttggccaccttggaccacgtgccgcccttgaacttctcgccgcgcttgaactcgaagcccgagagctcggcgaaggcgtcggccagcggctggttggactcgcacgtggcctcggccttcttgcgtggcttcttggccttcttgtcgtcgtcctgtgcgtcctcgtccttgacgtcgtccgccttgcgcttgcggccgcgcgtcttcttctccgtcttgacgtcgcacctgtcgtctgccttgcccttcttggccttcttgggagacgccgactccttcacgccgaacttcttgatcatctcctgcattggcacgagcaacacacagcgagtcaacgttagattgaaaaccaaattgcagtccaatgtcacattggcaatgtgtcatgtccttggagcaaaccttcagtgccgcgtccagttggaactcgccctaacgttgcatacaaagcgtcagtgattgcacaacagtaagcaagtcccttgcattgcagctattggcgccgcacattttcgcgcgtggcgttgagcatcgtgccggcctcgacggcagcattgacagggttctgggtatggacaggaagcagcgcaggcgttagagggagttgagtgcaggtgggtgtggtggatgtatgaactggggcgcgtaccgtcgggaccttgacgccctccttcgcgcagagcgccagcagctccttggccgccttcttgctcgcctcccgactcgacatggctatcaaaatgaaattatggcgggaacgtaaagcagcctatgatatagaatactcatgcgttttcataggtataaatcatacggttatgtacaaacacataaatctatcataagaaatcgacgcttgcgatgctgctggtggcgcaaagagacacaccaatgcacacggttatcacggtccgtgataacttcttcaggcatagccccacacatgtataccagtccggaatgtatataaagcgtatgcagcatgtatacaacatgtacccacacataacatgtacactaccgatcttcctgcggtgcacacagcgccggcagcgccattagcaaagttcccccaagcccccccacaagcacccagccaccatggcgtcgtatgagtacgacgtcactgcgtaggcggagacatacaccttcaacagtgtcatgctcgcatgcagcacggaagagaccgctcttgccaacccgtcctcctcaaacagagataccttgtacccatcgagaagctccacttgtgggcaatgggtcatcacattcctaaagaattcttcactggtacgaaagggatcttcgctcgttcgagtagggaccgacaagcggcggagtccgccgaggttaccatccacacgccatctccccagagcctcatacaatttcatgagtaccatgtggacactttcatgatcgacctcttgttttgcatagggtagtgtcagagattccagcttcagacagtgcgcagaggccgcttccagtgcagcaagtacatggcgactgtcgagaggcatttcggctaaattgagcaccttcagcactggcaagcacacgaaaatgcgctcccaatcgatgtaaacgccctctatggtccctcgtagacttggtcgtagcgtgaactgacgagaatgggtcaagttggcgctagtacgtacagctcgcttgcatttgctccttgttcctccattgtggagtatattttgctcagttctcgagatgaagcggtcttgaagacgatggtgagggcggactgttgatactgccgagccatctcctgcatagcagctgcccacgtcggcgcgaccgactccaattccttgagcatagcgattgtcgctgtgcgtttagttggcgcgaggtcttcggtgtagccaggtactgcgtagcccaagatactccgcaagatcggcggcggcagcaacgggaacttctccatgtttcgtttggtagacagcaaaaatgtgtttgaacgtgacaaagaggaggaaagtgaaaaaatacgggacgtgggtcaggcctttgttaaagcatggcaaagaatgaccccgtcagtgtgcagatattgggaatcccttggcttactttttggaagggattttccaggttcgactccactccccccaataatcccaatcgccagccatctccccagcagcttcactcttgtcgtggaagtaccaacgccaattccaatccatccccacccgaacgacagtttcttcatcttgggcttcacgtgctcaccaaacacgcggaagtacgggtacggcatttcaggtatgggcgttcggcggaggctcaaacgtgggcggcttcagcgggtcagaccctaagggaaggtgctgcaattgctcttcgctatccagggacactacacatacaacagtcatggcaagcgtcgacacagcgtgtgcccccgcaattaaatgttgcgattagcaatgggtaatggagagctattgtttgtacatctttcagcgttcatacacgtactggttcgactcggcgttactgctgacttagttaaaaaaaaaagtgttgagaatgtatgaaatgtatggctgagcttagatttctttaactggtacgactaaaatgctccttggtctacagagcgagccatgaatactgtatcttcctggtgggcacgctacgctaacggacaccacgtgtgtgttatattctgcttggcgcattagctcggaagtttgctgcattgcgatgccgcacccgcaatgcagcaaatcttgcaggacatgttgtcctgcaaaaacactaaagattgactttgccaagcttgtgccaataatactagattttgtgtaggatttgacgccgggatgtttcgatttggaaaatacaggacattctatgctcgtgagccagatcgatgtcctgcaaaatctggagaatgtagatttagacgcacattctcaaatcgatgatgcagagctactgcaaccattatttctgcgaatttaaagtattttaggaatgttaccgtaaaacacggatccaatgctacacatggatacagtgcagcaacccgtaaaaacaaaacacaaaataggcagaacacaaagttatcaatggtgacacccccctctcatgttgatgttaacctaaacgtcttgcaaaaaatcggagcctcatcttcttgtacttcaccaactcgaaaccggtccgcactatctcgcggaccaattaggacgatgccgctcttaataaatccgtttcggatacttgttgcctacactttgttccatgcatccgcgacaaagcgggagagcagctcgcgcttctgctgaggtctttctggaaagtcgttctcaacgtggaatgtcaggtagcaattcctgcaataatgacaatcaattagtcaatgacgctgtgatagcgagatcgttcgtagcatagacgtaccggacgtgatccttgaaagacttcattacagccacgtccatcggttgcgcgatgccggtgatgccaggtggaataaattccacctgtgtgcagcgctcctcttcaagcatagtcctcaccgattgcactttgtgcacttttaagctgtcgaggagcaaaagcttgcagccatctacactagaattccaaatctttacagcataaaacaagttaggcgaattaaaatttaacaataaatcaaacaatgcaatcagctacatacccgttgaatccactcacgcatcacgtcctcgctgcaattcgccttacgctgcaccgtgtgctcgcatcgcggtgacccaaagtatgggctccatgccgattgcgagaccggcccaccagggataccggcaaagacgataagtggcggcagctttactccagtggcggatgcgaccagggaaacggaggctctgaagccatttacatcgctgcctgttaaaaaagataaaggttagaatttttttcgtcaaaccaaaacaaataatctcaccttgaacgatgtcgactataggagtccctacaaagtcaatcgtcgttttaccgttcatgtcgataaaaatcgcggtttggtccatgttgaagacggactcgtacttcagggcccccttaataaacgacaacgacccggactcctcaatcacatgctgtattgagttggaaaatacgccggcgacgcgctataaaatacaaaacaaatctgaattttagaatatatatgtaaaaccagtaataattgtagactcacctccatgttggacctctttttgcgtcctttatgcgtgatacgtcggatagtaagtcggtttcgcttaagcaggcgccgcaggaactaaacgtttgcagcccttgatcttgatgagaagagggatgcattatacctagcatgcatgataaggaggtactccgcagagcgagcgtttgttactaaaaattcttcacgttaagctaataatgaatacatttcttccaactctggctttctgatgtacatcgagcggttgttgtcggggtttacgtggtacttgttgggtttggcgacctaagggctgcatcgtccttctgccagcggtagatagtggtgcggtgcacaccggcagctgcagcagtcgctgtaatagtccccgccgccatggcgagggcacacagcttgtgcttgtttttttttctttgggcggcttggcattccgtgagagggggaaaactgaaaggcaaaaggggaaggatgtcggctttggcacctaccaggatcactggcaaggaaaagccccgaaaattttaaccagtgtaaacaatagtgtactgtccttatttttatatttattatctactttttacgagtgtagcgttggatccgtgttttacggtaggttgaacctcattggctataaatatatgtctattcgtatcgaatcagaagtcaaacattttggtggggcgcatttttccgtcgttatctgtacactactcaagtgggacatgagttgacttttgagtaaatacaaaatccgctgaacaatggaatgcattgcagactttaccaacatgtagggcatagactagggttccgcgaaggctgggataggagaattttggtataaaccccttcttttaatttttgcattatattttttcttattagctacggtcatctcctgcgcctgcttcgcagccgcagcatctgcccggaaatttgccacttcaaactgtctaccggcaatgttttccaaaataaaaatgcgaatcttgattgagatctgtttggggcttgtaggaaatacaagcttacctttattgtgccttgcaaaatttttggcaattccgatgctcagaagtcggatatatcgggtcagatataattttcagctcagaaataaagacgagggaccccagctggaggtgggatttagctggttaaacctcggtcgagttgaccatacaggtctgaattgccgttttaaatcggccaaaatgactaccctccagctatatcggttgctgccctggcggccgtcgcgttatatcggatgtcgccctccttgccgactccgtgtcgacttcggcgctactatacaccaggacaattgtcggaccggtggggcaagctccaggtcttgtttcggcagctacgcatgagcggatccgcgtcgctcaggcgctggtacacgagagatagcgtcgttcacgacgagcaagagaaaacaatgacaggcttaggcgaacaggagtgacgtatgcagaagaaacttacttaagtaggctttacatgggcaaataccacaccattttgctctaagggcctgtttcatttgagaataagtcgggaatagcgccgagccggaataacaattatacgctattcaaacgaaacaggtggagaataaagccccacaataactgggaaaaagaatatgcgttatggaaggaagcaaatcattggctggcgcgacattcacaaaagtccgctctcgcgaacactgcttcgagcactgctcgctgctcgtcaccaagcgcgccgtggtgaggcctcgagcgggctctagaggagcactaaagctgctctacccagtcgcaaccaacccctgtataggccggagcttcctcacctcgccacgaagtctctccacactcccagcagcgtcagcatcggctggcctgcggagtctggcggtcctcgacggagaggtgaggaagccccggccatgtagctattcggctcagaattgctatcctgactttcaaagtcagaataacttattcctgggaataacttcttagccaataagattatcgtattttgtcgtaattaagcgggaggaataactcccgctattcttattccagttattctcaaatgaaacaggccctaagaacgctactttacttcgcttcagcaccgagccgtagatggggtcgaatacgttcttgtaatggtccagacggcgctgctgacgatggccttggataacagctcctcgacgtcgcccgttatcagcgtgttctcctcgcccttggacgcgtcctgcaccgactgctgaatcttgccgatccccgtgaccacgccgtggcccaggccgttgaccacgaccgtggcatctaacctcatgttggtctagccctaaatgaagttctccgtgccacgtcgacgtccttgttgacccacgtgggctcgcccttcacctgcagtgggtggccgtcgtcttcacggacagcaggcacaggtctccacagacctagtcctccatgcggacctcctccatgtcaccgggaagaagctcgcgcgcaggcagcgctctcgggcatcacgtgcacgttctcgggctgcaggtccttgaacaccaccagcgcgggtcggagagaagctcctggtggcacagtagcgttacattgcagcatgcttgtagcgcaagtcagcaccttggtagtttacgtaagaagcagattataccttacctaagcagggtggctggggatcggccctgctgcgggcgcacgacttgtgctaggagctggcgcagtcgcagcggcgcggctggtacagggggttcgtgatgaggtcggcgcttcgaggtggctggatggctgggaagcacggactcagagatccgatttaaaaaaactcgggggtggcaaaacagtgggttggcggatatatttaaacctaaccctatcaacgtcggatttatcatttccgaccacaacgatatccgaggtaaaactgaagggcaaaataactgcaaggcacaataatatttacttcatttcgttcatacgtacccagctcaatacatctactggttaataccagtgttgtcggtagcgcaccggttcgatctgccctcagtgcggcaccggagtcgtaccgggttcaagaaaatgtaccagccattactttcgcttgaaacctttgctgtatatccttaccatctgtagcgcatatttttatttggcaggggatacgcatacagtctccgccagagaaagtgcttcaacttgcatagaaacgccgagactgtgcactattcatacagtcgccagggtcggagactgtatgacccaatcaccctctcatcacctttttccaagactgtatgcgtatccactcccatttttattttggagtggccctcacaaatcagcatttttcggtgtacatgacgcatgttaaaatactttacttgtatcaaatataatctctggcggccttatcggctcttatcgcatccctgtagtgagcgtatccctttcattcccactttatactaaattttgtatggtggggtcaaacctgtaacagaggcccatgtgaccactgaaatgctgtaggcttgttatataaatatatatatatcgagccctttccgagggtaccgtagtagtgcattcgaaaaatggaacacagtgaggagctgtcactatgtagcaaaaaataccgcaacgtctttgctatcctaacgggtttgcttcgccacgagctttcgagcaacctctggcctccaccagcgcccgatcttctgatccacctttgtattgggcaagcgactccagtcgccacggcaagcaacttggagagctgcgcacacccatatcaaacgaggtctcattgtcagcgctagccatccatacagtgtcgacgccgttgccgccgctcatcggcgaatagcagccagtatgcctgcttcgactggattgattgatacacccactggttcaacacgacctcgttcctggcatcaagtactgtacagtgacacctccctaaatgaaccctctaactgaccatgtgttccctatctggttaggattcctcgactgcaaacgggattatatggatttcactataggtgttctataactgatcaaaaaccgctttattctctaaatggtcgtcattgttggcgcctcaaccctctaaatggacgccgtagtaatagatccaaacgcatatatttttttctcaatcacttgcctgcctcctcccacgtatgccattgctaccactactcccgccacaagaaatcgagcgaagagagatattgtatttgggatgctaagttggaacaaagagtttgcagtaactgcaagcttgtgataaataagctagccacagtattttacaatcagcgcagcctacatatatatattacgaaaaattaaaatattatgatgtcgagacaactggggctatgcagtagataccaagcaaaagataaaactgcaggcatggtggcaggatatcgggacaacaaatattcctataacctcactgtattgaaactcaagtacaacctgaggggatgcgattctgctaataccaatgagaagaaggagtaggaacagacaataccgcgcctaccgttattggttgagttctgtttgtgtgaagacgaaacaaaacaagagtacgaaaatgctagaggggtaccaggtaaagaaagcccttgtgcacctaacgtatgaacatgtagccattagaagtgtagtcatttctttatctgaacaattctttaactgaaacagcgtattagaccgagcgaactgggtgtcatttatagaggtgtgactgtatgtgctatggtggttccggctgttactcacgcacgtgagtcacacgcaacgttgaagcggtctcaccaaagctcggtggctgtcgacggcaccagcaacgcgcccacatcgtagctcgagccgagcactgcctccgcgacccagactaaatagcacggatgatcggtacacacgcacagcattctcgccatccctatggcgcgccatcacaggcgcggtgcggaccgtgcgacctttgggctttcgataatggcacgcacgaccggctaccgagaaaacggctgcgctgactagctcgtcctgccagcgccgttggctcgaagttcccttgatcaagttgatgcctgctgctgcacttgccgccaccgccgctgccgccgccgctgccgccgcagaggcctgatttaggctatcgccgcctcgacctccggggcgacggcttcgattggggagccgagggaagcacgcgttgccaatcagctgcgcaagaggcgaaaaagatgagcgttgaatccaccgccgccgccgtcgctgcagccacccattcagggtcagcaaccgcccgccgacggtcaaccaatgtccgtggtgagcgcgagggtgggcgttttgccagcgagcttgggatgatgctacatgcagcagtaccggcacttgacgcgccgagttgccagcagacctattatacttgtgcagcaaaccttgactgctgcagcatagcatttcgtcagcatttgggaacgttcggccgagcctcctgtgcgctcgcctggcattttccgcgcgactgccattttcataaagcgcgcagcgggctgagttggggaaattttgacgcggctgccgcacgtcccactttcaagagtatagtgaattcaagtcgattccgttcgtcctttttgacggcagccgcatcgaacagtcacaatgggctcttcatcagcacttgcgtaactcgcgttggtctcctctctaatccggcgcacaactacgcgcgactcaattctcatttggaccctgtatgcacatcccataatttcggcacattaattctcgtcggccgcccatccaatccgcgccctgccatccggcatagcccccgctgcggcatccgcggcagacgccccgccagcacccttcctggcctgccgcgcacaagcgaaaacgctgcgcagaagccgcgacgaaagcaagcggaaaccgggccgcgcgcgtgaataagatccgcccttgttattagtccgcccgcccgtacgcccctcgcgctgtatcgctgacacctcaatctccctccgctccgctccaccgccgcattgacgacgctccgccctccatgctgatgaccgagacgtacacgccgcccgccgcgctgggcacggccgcgaccagcagcgcctcggaccccgacgccgacgccttcaacgagcggctgcggctcaagatccagcccagcccgcccaagttcccgtaccgggacgacccgttcgagctcaccgtgtacctcgtggacccggccgaccacctcaagtcgggcatcacggtgccgctcaacgtggagctctacgcggccgagaagatgatgcctgtggagaaggacatcctgcacatcgaccccagcaccaagcccgtcatgaacggcgacggcatctgcaagctgcgcgtgagcatcagcgagtgctccatggcgctgggcaaccgcaagttcgtgatccacatctcggccgccgccaccaaggacacgatgaacctcaacgtctcgcccgccgtcacgtccgagatgacggtcatccagcaccgcctgctcatccaggagaagctgcccgagctctggtacaaggacgaaggcggccgcgacaagtgcatgactctgcccatcttcctcgtcaacgccaagaacgagcgcgtgggcaaccgccccgtgccgctccgagtcacgctgctctacgagaacgagcacccagtgctcaagcaggacatcctcaaaatgtcgcccgactgccagcgcaccatcgactcgacgggcaaggccgtgctcaagctgcgcatcgaggacgtgtccaagaaccaccagggccaggccttccggctcaaggtggaggccgacacggcgcagtcgccgctcaacttcgacgtggcctacgacctgagctcctccatctcggtgcgctccaagcgcaacaagcgtcggccaggcaagaacgcccccgcgcagatcacacaccacattatcgctggcgcgtccacgcccatgtcaaccacgtcgtcgcctgcctcgaacgccgagcacgagatgatgctagctggcgctttcggcacggccgcctttacagcggacgaccgacgcaagaggatgcgcactggaggaggaagcgcgtcgccaggaactcctcgcgtgggaggcagcccacagtccggcaactctcttacgggtgccatggagagcattctaacgtggactggcggcgtcgttaacggactccaccagctggagtggcagaccgtaggctacgaaagcaagagcgacggcacggccgacccggagcgaccgatctaccgctgcccagcatgctggcgctacaaggacgtcatgacgtacgaaacggcgcagcacgatacgaaatgcctgatcgccaatctcctgctgacgtatgcgacggacaccatggggcacctcgacttcgtgctcaagggtatcgagcggttcccagcgatgatcgccagtgcgcaggctgccgcgcaaaaggcagcagcaaagccgatgggccagatgcagaaccagaacgccggaacgccatcactcgtgagcccacagaatgccggcatgatgggcgtgaacccgctaacggatgatgcgatgagctcggccatgatgatgaactccagtatgggatctactgctacgtccaaccaattctcgatgaccaacagctcttccgcaatggcgaccgcgacgtctgggctcgcaggaatggagggtcctcctggtctcttccggaataactcgggtggtctcacggagttcatgcgctcgctggatgaccaagattcaaatgacccaatgttctaccagaacctcgctgccagtggaaatggaagcgccggtggtagccagattgctgatgccattgagatgcaagtgttttacgtcgttgcgcgcatggtgacgctgaactcgagcaacgccattggcttcccagcatttgatatgaatatgaacttgctgggattctaccaggagggccgtgaaaacgcaaccactgaggtggtgttcgtacccgtgagtgacattccagccatctcgcaaggagagattatggagacccagcggctcttgcaaggagaattgaagggtaacagccctgcggtgcatacgctggcacgctgcaacaacgacctggtgaagctcaaggaagacgtgatcctcttccactggaacgccaaggaccggattactcccaagtggtaatgcgctcaccaagtgttcgcgatggatggagtccgtggcgagggttgcaggcttgcgtcacaccaagggacgcagctccgggcgtgtgcatgttgcataccaaaacgtaatgttgtatagaagcaatctcgcgacaggagggaaatcatcgagatgtaacgcgagtggccaagaagaaagcgtccaatgaatagtataaagcaatataaacgcgatttaatgctacgcggggccggccctgtcttgtcaagagtgttcgtgtcgactccagtctgaacagcgttcacgttcaaccagaagcctgcggaatcccagcgtgaccggctgacgggtatcgaccaacttgcgcatagtcttcttgaacttctgcttcggcggtagttcttggccattgatgctgagaagaagatcgccgacggacacgagtccagagctcaaagcctgaccagaaccaatgcgtttcacgtagacgatcagagcgttttgacgatcggcgtcttcgtagcacccaaaggtgattccaagctcaccttcactccaaagaatgctgtacgctgatccgaacgtggagtgtctgccgttcagtgctccatcctccgcgtcgtatgaagaccccgacaataatgtccgctggaaacccggtgggccctcacgtcgacggaagcgaagtactgccggtttctctgcaacacggagaagagtgcgaagctcagttgacgtcaagcctgaagtggtccagttattgatggctacgaacaggtgcccaaccgcgtcactcggtagatcgagagtggattccttcaggaccttgtggacgatcgggtattggccccgcttgggtgttggagaggttttgttcgcgtgtgatatttccagctgcagtccaagctgattcgtggtccaaatcgtttcatactcgtggtgttcacggacgagggacgatcggtgggggtaacaatgctccacacgcgatgctcgcctaaccagcgtccgatgattatctggatctagctcggtttcgctaggggcttgagtgcttggaggcggtgacggaggtggggacttcgaactacgactctcgtcatcgcttgagtcgtcgaaatggggtggacggaatacgagttgtatgggctttggtaacgtctggagatcacggcacaagtcatcgagagcgcgaccttcagttcgtactccattaattgagtagagctgaaagccatgctgcaaacgctccatgttggcggaggaccctttgccagtcaatcggttcacaagagatgcgcctgaaatggggtcctccagcagagtcaaccccagcggaccgcttttccactcaatcagaacgccaccgtgtgtgtcaacatgagttggcggctgagcagaccggccaccaggtccagcctccaggcgaagccgagattgagccaaatggccacccgagggaagcagtgaacgcacgaattccttacatcgaaggctggcaagcgctcgagttgtcataccggtagccgtcagactgggaatggcgttgcgtagtgagaacgaacctcttcgctgctctctggattgctcgcttgcagcctggctaccaaaccactgatcatccgcatcgttatttgcagcacgctcgaacgtcagccgcaatggtcgaggacatgattcgacgaactccatagtcggcccaaacccagcggcgatcgtgtccatctcgttgaccgccactagaacgtctccgagctgcacgccgagagaagaatggtcctccgagccacggcgagttgggagccgcgttacaacggggacagcgttaccgccatcgggtgtgaaaaacagccccagcttccgttggccgagtaaaacgtcaaagcgcacgcgtttacctgtcgtcggcgagcggaagcggatgatcgaggggctcttggacatctgaaccagcacgatcgccgcctccgtgtccatcgtatggacgcgcttgctcgcgacggtctccagaacatccccaggtcgaacccccgcctcccagaccttctgcgccgtgacgcgatccaccttcagctctgcgtcttcgtcacatgccagtgcgtgcttcctgtcgtcgttattcgtcgtcaaggtgaagcccgggtctccaccagtccaaacgaagaagcgcaggcacgtgaaatcttcatgtgtggagctccaggagtcgggatcgcgcgccgatagccgagtcgcaggcaaagctgtaccagcacgacgcgattgttgcttggtagaagcgtcgtggcgccggaaggaaaacgcggtccgcagtcgttccagcgtcatcaaagagagtagcaataggccgcgttgctccaaccaaaaggcgaattcgaaagtgtctttgccgtcccgaagcatggcaccaagcaatgcagagtcagcttcactccagtctgatggcttcaccactcactcccgtagtctctcggtgatccattccatcacctttccttgttgacaagcatccaatggcacttcaactccctcttaaatccgatccattttggcggcaactataatcaacgcgttcaagagctccccagcaccacagcaaccgcccagcccgaccatgaagcgcctcgggacgcagccgatcacggccttcttcccgcgcaagcaggtgcggcgcatcagcatcgagtccgtggacagcgacagcgaccatgacgccgccaccaccgacaccacgaccacagagccgaccggagagcaggacccagagcagcagcagacgcaagccggacgcagcgccgccgcccgtcgagacgcgcgcgaagacctgacgggcattctgcagcgccgggagctcgtgggctgcgcgtccacgcggcagctcgtcgggggcctgcggggtccgagacgccgccgcaagcagcagctggtgcgctgggcgctcacgcacttccagcggctcccggtggagctgcagctgccgccccattgggagcgccaggccggcgccatgagcaccgagacgttctacgccagctgcctcgagttcgatgcgcagggggtcctcctggccgcgggggcgtccaacggcatcgtcgcgctctacgactttgacgacgtgttccaccgcagcttgaacctcggacaggtagagcaggatcaaggaaaaattcggggagtggatggatgaactgacggggttttgtggctgtttttgtggtgagcagcagatggagggtggggaggacggaaaggatcaggatgctgttgaaggtggagacgtggaggtgcaacaggaggagaaggtggcggacgagatcttgcacccggtaggcttgacctttgtgttatagttgttgcccgagtttctgtgtgaatgagctaacgtttgctgtgtggtgtggtgtagattcatacaattttcactccatttgaagtcaagtgcattcgttggaatccagttaatgaggtaaacaaattgggtcggtgttaatgtggggtttataatgttgatgatgtcgatgttgtgggtttgattgtgaaggacgagatttcggtgtcgttttcgaaccgcaacgagattcatgtcttcaatctgcgcaagtttcctagcaaaccgcacaaggtgctgaagagctcgaaccacccgtccagcgggtacaacgacatgctgtaccttcctgcgaccgagtcgaagctttcgaacgcgctccaaatcggtgcgacaaaagcgaagccacgcgcaggaggttgcagtgtcatcgctggagatatcgatggggctatccgcatgtgggatacccggttcccgttgcggccagtgtggagcattcccacaggatcgcaaccgattaacgcgctggtgctgtctccgaacaaacagtttatcatctgcggcaacgaggctggggtggttatggtaagccacgcatgatgagtactcgttcgtacatgtacacgcgtactaatcggagcaatgtatctatgggcgtgcagacgtacgacatacagcacaagtctgtcccagcatttggctcgaaacccgtgccgcagcgaaaagcagcattcagcatcatggaagcgatcaggcgtaagcaacccaacgcgtgcatattatttgtttgtgatttactgacaagcccttgggatttacgcagcatttttatcatctgcggggattgaggcggtaattctctcgaaccgatccggctcacccggcatcacctcgatgcgcttggtaccgaatgcagagacgcaggtgctgtgtcagttgcggaatgattgggtcgtggtcatcgactacctgcttggatcagtcataaagcttcatacgttcatccgaggtatgtaagcagagacaaattttcaaccaaggcattactatctaacgattgctgtttgctactgtgtgatcaggtctaaaactgagagagaagtcaaaggcagaagcctcgccatcggtgctgtcgatggctagtgagaaccagtatcatcgggacttcttgcctagctcgttacggaattcatggctctcctgccatcgttgcagaggcacgttcttgttcgatgaatcgatcatgtgtaccgggatccacgacaccacgagcttgaacgtgatcgatttacagcagctgcgacgcatcaagacccagccagcaacaaaacgtgaggatggaaaagttgaagtcgatggggtaagaaacagcacgccaggtcctgaattgcctgcgatagagcggcttgatcgattccgcatccctatgagcagcatcatgactgctgtggcagctcacccgaaccagcattcggtaatatgcggcggcgaaaacatgaggctgcagatcatgggtgttatgggccagcgagtacaagcgatcaccaagaagggccaggcaaacgatcaataaattcagagctaatcatgaatattgttgctgatgtccacaagacatatttcatgctcctactgcactgtggactcgtcttacatgtatatagggtttgctggcatactcgttttgtttgtgtggagtgtgcgtgcatctgtaaccccgcagaagttcacatcgaaattttgcttcggtggcacgtgcaacttatccgatcgaagatagcacgattgtgccaactttcaactacggaagagatttatttatgtcaaatgctaacgagccaaatttcgagcaatgacaagccgagcggaaatttaggtaaacaacgccatcagcagacgacaacagtttcttttttgtggatgttcaaatcaaatgtagcaatttcattggttaatattgtaatatgaagtctgagtgttgctgcttctcggctagttaactcttttaataaattgaactgtttcatttgtgtgcgcattctgccctctttacttgaggcagcgcacttgaagtgcccgggcttttgatcctgacgtcatgcactaacctcctgctagaagatttaaatatgagtgccaggagtgaaatgtaggacatcatagcacagttatcacgcgacagtttgttcccatttggggcaatgtttcttcgctttactgttgtcgttcaccccaccacgccaactctcctttctacagtaaagtactaacactacatagaagacggaaattcggatagagcgcgtatacgcgaaccagtccacgctgtagcatcgactggctgcaggcagtggtccagttgcaggagcaaccgagttacgtacgccctcgaactcgccgatgcagaagatcgagcccagcatcgatatggcgcgcgtcgagcgcccgcgcagcagtggagctcctccgcgcctcagtgtcgtaggtggcactaagattatcgccgttgcagagtacgtggttgcattttgttgttggactgtaataataaggtgtgagggggttggaggatctcggtaagcccactggcaggctgccacgccttcacaactactatgatgtacgctcatgcataaaacttactttaaagtactacatttaatgtagtaccgttacgagcttattggccctctttgtttacgtctgccaacgtcgtcgtaactccgtgctctacaacggctgcacttcttagtggaacagccctacggactgcatgcacgcgttcatgcagtcagtatgccgatccttttaagcttgctgccagcggtcaactattaactacatgcacattgctttgtaacaaaaggctacttacactaccgcgccatgcaactgcatcgtttcggcgctcaacgttgccaccgcgtccgcggcaacgatgccgctgtcgtggcgagtagacctgaacacttttggccaattgtatggcgcaaactagtgacagacaagctgtcttatgttttgacagacaaaatgcaatgtagccaccggtatacaaaaaccaagatgtcgtcaaaacgcgttgaccggaaaacgtatgacgctttgtcttatgacaggcattctggggctaagtatcgtgttacgaaagagcatgaatcacttgtgtcgagcattcgtatgacagtttgatgagtggggttacatttgttgctctcaatattaccttagtaagaatagcagaagaagccctggcatgactatgctcgttagccactggtagttagtgcaccaagaacaagtataatagtagcaatactcttgtcgagtgtgtgatatgtacctaaatggcttgcagttggttaattggaccggcgataaagcacagaaatagaagccggaaaataatgcaactagatactgtaggatcaatacaccgctggactgcaactgtgaaaccggattagtcctattagattgaaaatccgccgattgagcggcatattaaaatctagtaaatccaatctcctaagcactcttccattattcacaagacagagtaaatccaatgtgaaaatcatataatttcactttgattatataaaaacatgttaataaagataggcgtacatgtaaacctgcgggttctggttggcgcggctgatattgttcgcaatgtacaccgaattccaatgtgcaacaggcattcaacccttgtcaagatgcactgccgcaagccaacgctcattgtagtcgctcaaaataggctagcgaagcagattgatttaaagttgatgattgaacgcttgcctagtgtgtgacggggtcacacagcacaatgcacagaggaagtgcgtgcggatattactatccaggtgaacagcagttcaccagttcccggcctcaaagggaacggtttgctacaaaggagtaggttataagactgactgtattttggtagaggttaacttggtcgtaatacaaactacaagttaactataaaaaagcccacgcaaactcaaatggttggcttgcggagctactggtaccatgtaccatgaactcgggagagtgacacccgtcactcttcatgtaatgggtacacttgattgtaccccgttacatcctcccccacttatctgagaatcacatctgattctccaatcagcttcgagagaatccgaacacccaaaggtcggattctcgggcgctgccgccgcaaggctggcgcgcctcatcgtcacgcccacagtgacttgtgcccgcagcgggcacccccgcgcggaacccccctgccctcggcgatgttggccgcgaagccgacgcgtttagtggccgtattcacggcgctagcaggcgcagagtgcctcggcacgggatgcatgtgcctccaaacttgcggtgtcccttgtagacaaccagcagttggcgtcgcatggccctcgggccccgctggcacgttcgtgctgcagtgcctcccgcgagggacagcacctttccggtcagcgcgtagcgtaaccatggagagagctgtgctgctcatctccggccatgaaagcggcccgacagggccccgctcgtcacagcacggtgtgccggtcggtcgaatacgtcggctcgacccatgggctatggtcaagcgctgaccacagccatgaagcgtcatgctttaacgtcgtgtttgcttgagcgaccatggctgcttccagcaacccgctcatcatgcagagcagcgcggtggacttgtctaaagccctgcagcgcgtcacggccatcacgtcgccgacgctaaggtgtcttccttcgacaccagggtaccgcaagggtacttcatcgtggtgtggggagtattgccctccgtcaccggcgatcgcatcctgcgtcgcggcgaccaacaccaggtcggtgtgcgtgcaagaccgcatgacacacagtccatacaggacctcaaggtgtacgagggcaccacctcatacaccaaaggcacgtcgtgtatggcacgtaccacgactgccataagtgcctcgtgcacctcaagtgccacgtgcagaagtagtgtcgcgtgcactaggggtacctcgcgtacaccaagtgccacgcacacagtgagcgtcacgcaccgcgactatctcacaggtagtatgtaccacgtgcacgcgtatggcttcgcgccttacaggtgcggcatgtgccgcgcccactgtgaatgtctgcaaaggcaacacgttcgggttctcccctcgtgggcaacacccatgctcgggactgatagctacctggccggcagacgtgccgcgcccagcgtagcaacagcctggagctttggcgtggtgctgatggctacctggccggtagacgtactgcgtccagtgttgcaacagcatcacgctgcggcatggtgttgcgtatatacacatgccatcgtccacggaccaagccgcagattggctgccatgtctttgcctgacagaggcagccttccagcagcgaatgcgcgcgccatcttcggcccagcagcgacagtagccgctgccaaggttgctggccatcggtcaccatgaccatgggacctgagcagcgatgcatcaggtccagcaccttcgtgcaatacttcgtgagtggctacaccatgcagccactacactggcttctacgacgaagcaagtctcatgccaaagacctcgggaggaagggcacttccgatcccctcccccacttacgatttgagccccggcgggtcaggcgccagccggccgcctaacctcgcgccgccctgcagtaccgagtcaccgtgccagcagactccggtggcacgggcagctacccttctttggctctgggtcaacatcgtcgaccagggcttggcatctaccagcctggatgcagtttgagtctgcgtgacttgacgtgttactctgttacccatgtcttcgggcaatgacacccatgacagcgtacggcttgtcctgcattcagagtagctgcatggcatgcacgcatactcagactcagccatctcggcaccgagtcatggacccttgttgtcccaacgccgcacagtgctaggcgcgacagaccgtaccaacgatccctgccgtgcagcggcctttgccttcagaccgagcatgctcctgcatgtggtcattgaggtgtcgccctccggcagacacgttccagtcgtgatcgaccatgctcgccgagtcggcggcgacgcaacatgcatcgccgcaggtacgtcgtgtacccaagccacgtcttctgtgcgcatggccacagctgcgctggtcgccacccagtcgaacgtcatccatgatgaccgggtgccaagcccttaaaggaaggaagtgcttccgcacactcctcccccgcttaaaatcaaagccgcgcggcgccttcaagaggaccgtgcggctatgacatcgtgacggtgtcacgagcctcttaaactccgtgtggtcatccaccacacgcgaggagacccgagtgacctgatcactagtcttggtcatactgaccgtgcgtggaactaagttacccacgctgaagtcgcttcgagcgactccttccggctcatgcggagccttacggcatcgtgtggaactacgttacccacacaggaagcgcatcatgcggcttcacaatccgttaccgtctgagtgacgcgtggggaactatgttacccacacaggaagtgcatcgtgcaccttcctcatcagtttaggtctgagtgacctggtgtggaactgggttacccacacaggaagtgcctgcagcaccttcctcttcagttatggtctgggcgaccgggtgtggtacttggttacccacacaggaagcgcgtgcagcgcgttcctcttcagttaaggtctgggcgaccgtccgtggtacttggttacccacgccggaggtgccttgagcggcctcctcagcattacatgctctgtgcggagctaagttacccgctagtcagtggtccttggttacctacctggtggtgtcatcgaacaccacccttgtcaatgctcatgccgagcaatgactctcagcactggagttgcttgttgaggcagctccacatgccaggcataacagccctcggttgcagataccctgcaccttcttcatggagtgtcagtgatgcctcccttcttcttcgtcgtcttgtcggacgcccttgtgtctgtccagaggtggaaacatgactcaccaatgatctgtcagacacagagggtcggcttagcgtcaaggcgttgtcgcgctactcgaccgagaacctgtgcagcttgcacggcgcactcagggccaaatcatacttgcttaagccgaggtcatatacggttccatgcccagggccgacttcggcacgatgtccgggaccttgtacggttccatgtccgggaccatgtgcggttccattgctgtcagcgccctcgcgcgcgacagccagggtcacagcggaccccaaggttcttcttcggcccagcctcagtcaatgagacctgcccttgtgcttcgactctctcgctgggtcttggcacttgtgtcgttgttccaaccgacacatctgacgacgtgcgaacatccgcgcaacgtcccagactcaatcatgtctagggataccattaccgccgtacactcacgtgtactaccgacaacccaccgttgtccttcaccaatgcgagcgtcagtgctcgcaagggaccccgggtctctgtggtgtacgccacccgtacacccatcacaaagactcgggcaaccccagcaaggccctcgtccttactggtggttgtgtcccccttgagcacctgacggtgcatggcgtcggcgcccccttgaccctctggtcttcgggtaggtcttcttcccagacccaggcgatgggcagacacgttgatagtgtcgtagtccgccgcagccgtagcagcgggctgagtactgctcaaccgaactcagatccatgggttatggttcgctgtcagcgatcacaggctgtacaacagccagagcaccagcctgcttgtggctgtactcttcctggagggcgacttggatcgcctcctccatagtggcggtgcgcacgcggaacaactgcgtgcgcgcaggaccgaccttcaggccgtccacgaagactgtcatcttgacgtcttccaacagtgggttccccaccagcgaggttgccaacgtgcgcatctcctgtacgtacgcgtacagctcgcgctccccttgtttgcaggcaaggaagcgcgagcgctggcggaacccgttgttcgccgggagaaaagcggctcgaagatgctcacacagctgagcccaggatgtgaaacatccaggttacatcgcttcgcgcgtatacgcccaagtcctggcacatccgccaagattggagagcgcgaaggcgactcgaaggttctcggccgagatgagacctgcgcttattgcgatctcggtctcccggatccagaagtgaagcttctcaccttccttcccttcgaacggaggcacagctagccgcagaggcttaggctgtacccactcatctgagccagcaggtttccctgcacatgagcgatgagcccgcgttcgtactcgtcaaacgcgctcacccgctcgacctgctcggtggcgtcgccgccgccaagctccggagggcatctcttccgaagatacccgccatcttccacaccgactcgaactgcgagtcaatcaagtgaggaaactcacttcggtccatcgtggctcacagacctgagccaccgaggattcaggtagaccaatctacccgcgtaggcgtaggattgactacaaatgctaccaagtgtgacggggtcacacagcacaatgcacagaggaagtgcgtgcggatattactatccaggtgaacagcagttcaccagttcccggcctcaaagggaacggtttgctacaaaggagtaggttataagactgactgtattttggtagaggttaacttggtcgtaatacaaactacaagttaactataaaaaagcccacgcaaactcaaatggttggcttgcggagctactggtaccatgtaccatgaactcgggagagtgacacccgtcactcttcatgtaatgggtacacttgattgtaccccgttacatagtgagtgcggaaacattgattgctcgggttttgcggcactgcccgagtttgatccagacgttcgcttgacgtgtggagcggctatcttagccactgatgtagcgactgatatttgctccagtgcggtagcccaagctggtacgggcacgcttgcaccttgcacagagggagcatgcccaaacgcctggcgaacggcaattcgtggtcgaagtagtctgattggttctcaatgacggcaatcaagtagaggttactaaatatatttgtcggttgatgaatattgggccagcatacaaatactaagtttcgaatattttatctaatagacgtatcggacggaggcgctggggtcgcttgggtcactacatgtatctaaaggagtgacatctttacagttatccctgaatgctgcatagcatgtatcatagtgcaaactttcgattatgcaataaaaagatttctgatgagcaggtcacgccgccatatcttacagggcacactgtcatggccgtagatacaataaatttagattgcgaggcttcggtatgacagccgctcaatcccgccgttgcctgataaatgatcagtagagcgagcagttagaacgcccataaaggataggagtagcgcgtcgtcaaaatcgtacaagcggattatcattacgtatgtgttttaaattgctcgtgacacgaggcagtccccagaaaattgccgacgatgtgccgtcacctctgtgacctggagtttgtatcggatgctgattggtggatgactgggatacggcgtggctgtacccgtgtgacatggatggcgactgtgggagagaagtgatttttcgggatgaatccagcgtctgaccgcagatgggcccaactggctggaagtgtgaatcctgggagtgcacgcccagaatttcagagagcactcagtccagccgcggactttcccttacgatgagtgcctaaagtctggcggaaagtgtctctggagaatgtatcccagagtacacctcatcttgctgtggctcagagtgccccagaggatcaaattaccctgagaatcaacccactactaccatgatcatgcgcaggaggccgctaaacccactaaaagtgtggttttgaggagatacacacgagtctgcactgcagcagacttgttacccagagtgccgcacggaaacctagagtgccgcacgatgacccagagttcacctccctgagtgcaggtgacccagagttccaaagatgattctctgggtttggaccataaatccagactctctatactgaacttaactgtttcccgagccaacacccaagaatccccacagttccccaagattcctcagaattcccaggatttcagaagatgaccctgagtgtcacctggttttcagggattcgagtcagttcgaagccagtctgcaatcaaatgatgcgtgaccttgaagaaccgtcatggatgcacagactggatactttcgaggagtcgagagggagtcctgcaccatactaaaccaagtctaaggacccacaattggcactttcgacgccgtgcgacaatggattcgcaagccgatcgcaagtttggaccgctgatcccaaggtatactcaagacaagacattttgaccccaagcatagtgaacagaagatatttgcccgaagaagagagagagagagagagagagagaagtagctgataaaaaccaaacagagttccttttaccctgtactgcgcaagtgacttcggccaagcctgccgacggaaatccggaggacccgagactacgaccgcgggacgctaagggcacatcaacagcgaaggacagccgtcagtgtgggctccatcaaactcaagtccagttaggtggtgaccagcgacggccttgagcttcctggggtgatccatctattccatatcctagttgggtcacttgctgtgctcgtggtagcccatttcatattattccagagggtattctggggtgctaggtagtcgcctccaggattttgtattgactgcttgtgtgaagggaaggtaactgatagtgattgtattttcctcctttattggaggtggtgcgcgtttgtgtgagtctcaggggagctaggcccctgaatttcagactcgagtgagcctagtgtgtgtgtgacccaccgtccaagggtccaaaagaataagtgacggctagttgtagtgtttgtatactctgtatttgttggttttatcgagctaggagggcatttgggtaaggtgtcttctgagttccaagtcccagagttgactgaaatcctggaccctgaattcgtgatattctgggtttcaggggatctgattctctgggtttgccttttggtgtggaggtgcgttctgaagtagacgtgcgctcccgcactgcttcgaggctatattttcaaccggtggagtgccgttccgtcgaagacaaacgagccgacagggattacacaaggtacccacgccaaccaaggagtgtgattctcagggtttaaagctttgcggctgcgaatctctgggtctatcttcttggtgttgactctcaagtcgattctctgggtctacccctggggaacagtcttgggctgcgctatacgaacccccctgggcgacaaaggtttcatcggcctcgcctcagctggtgcgcgtgcccggattcgattgtcgaggatttcaccggaatcaagtgttgaagaagtgttgagtgcccgtcaacctcaagctaccaagatgcctggaggacgaggggcgaagaagagtggacgcggtgaggcgtcacgtcagtcgcgtcgtgtttaaggtatagagcctcaggagcacaaggacctgggaacagtcgtccgcgacgctcggaaggcgaagaaggctgctcgcgagagcgaggcagtgcgaggtggggacgtcgaggcgtctgcagtccaaggtcagcctgctgctggatcgcaaactcaggaggaagaagtttcccctgggttccaaggttcgacggaggtgaattctgggtcgcggattcctgaagtcccagaggagcacacccgcgagggtggtgctcaggcgtctgagggaggcgccaatgcggttgagcccccggaggtgattgacttgatctcatcttcggacgagtctgttgtggaagtgaagtcggagcgtgaagtcggagcccgtgcgagcgaaggaggaggcgaagactcagagttccaaggtgaattctgggttcgcaccacctgaacccagagtttcagcgccaagttcgcaagcggcacccaggaagacgcctgaaagcgacatccgggaagctgctgcgcctgctccggaatcgggagcagcggcgttggacgccgggagcatggtgctgtacattcgacgtgaagttcgacgctgggaagaggtgaatcctgggaaggtgacgccgccaagtgtcgtttatgagtggccgactccgaaaccggatgccaactcgtacttcgcggccgcgtacgcaacgggagactacctcaagtggcgtttgtctctggagaatcaagatgaagcctggatctctgagtttcacctcgcccggtggggcgtcggaactgctcaggatctcatggcgactacgattccccagagtatcatgaccacccgcgagtgcgtcgccattctgcagactctgttcttcgaagtcggatttgagtttgtcaatttgatccctggctggtcttcgacgcgtgcttccaggattccagaaagtctggtgcgctctgtcatggaggaaacccagaatttcatcgccgtggaactggtcgagtggagattggtgatagctggtgtgcctttcaaggtaaactctgaagatcacgtcgcaccaagcgcccaagagcaagcaccaagactggactaccacaaggaagatggagacggtgatctattgatgacggactatgatgcggatctactgggccgacagtctgtcctgagattcagagtcactggactcaggatttcacggagcccacgagggtcgagtgatggtgagccacgatccaagcgtactcagcatggaccgcctcgaccacaagtcccgtcaacgccatccgcgctgtctacaccgtcgctgtcctctcttccagcgtacaagtcttcgactggtgcctagcttcagaattccactcccctgaattccatgtccaatggacgtgattctctggaggcgggagccgaggacgctgccccaggcgcggtgccaagcgtcatcgtacctcgcgcgcttcggatgagagtactgcctcgggcgttcaaacggcttatggtagctcttcgtcttcgtcgatgatgtcgcttggacaacgagttggagctctagcgcttgtggcccagcgtgccggtggctttgcagctgccggtgatcttggatttcaggtcacccggaccgtcatccgctcgagtggatccaggaatcttgggtcagtttcgtccgtgtccgcgaggtctgggcccgcccaaatcgagatgaacgtcttgcgacaacagcaggagtggcaggcccgcatggaacaggagcaacgcgagtttctcgccagagaacgcctggatgccttggagcgcgagcgcctcagggaacaacgtgacctggacgcgcgtcgccagatccaggaacttacggatcgcttggtccacgctgagatcgcccgaggaggagcggaacggcgtgcgcaggacgtggaggctcgccagacccagagttccactgaaactcagaggatgacccagagtatcacggaagctgtacgttttgagcgtgagcgcctggatgccgcctacgccgagcgctggcaacagcacgaagccgaagccgactcggagcgcgcgcgctgggtttccgagacctacgccggttggaaggaacaaatgtcaactatggagcagaaggtccaagaacttgaggcggagaaagagtgagagcgggagtcttccgagaatatccagcgcttccacgccggccaagtgcgcgaccttcgcgcaacattggcccaagttcaagcgcgtcgtgcaaccgtcgcccctgacttggcaacaaatgtgaggtcgtcagtggctcagaaccctgaagttgcaacccgaccccaagaatccagtggcgtaatcaacggaaacgcaagtgtcacaggccagagacgggagacagctgatccgaagaacacttccgaagtcgccgcctcccagctaagagcgaccctcgcgcagacttccgctgacacttccggcagaatcgcgcgcgtcaagcggggacatggcgctacggagaccaaggtgacgcaggatgtcaagctcgagcctgtgtctctggggaagacgtcggatcccaggagaacagcgacctctaaggcctcgcaggactctaaaacagactccaagcgctctgcacccaagaaacaccagcagaagaagatgaagcgtcaggatgtcaatccaccctcggactcagacccaagctccgattccagcgatgatgactcgtcctctcgttcggatgacagtttggacgggaaccctggggttaacctgacgacggcctctacggctcaagctggcactacgctcctgacgttcagaccgtacatcaactcgaatactctgggtgagttcgatactaaggcgtcactcagggaacgcgtgcattggtgggagcgttttgcgaacatggcggctcagggaggttggtctacgaagatgcgaattcaggaactcaagttgaaactctcgggagctgcgcgtgacgggttcaaccagttgcccaaagacactcagcgtgactggaaggagttggcgtctgcattcaggaagaagtactcgtcgtactctgaacgttacttcacgatggagatgaagaactcagagagcgccctggatttcttttatcgtctgaattccgccgctgggaaggctgacattgactttcgcaagtcttcgaagcgcccggagaaacatatccggaggttcatcacgaaactcagggacacgcgcctcaagacgtcgctgcagggccagagattcaggagtatcgctgatctagagtacgctctggaacaggacgaagatgtctggagccgcagcgaccatgatgctccgccacccagagttcgtgactttcgtgccgacaacattcctcagggacgtttcaaaccgaagcgacaaggacgtgcgtatgtgactaggggcgatgtctctgactctgagtcagacgaagaccctgaaatccacgcgcgtttccaggaaatcacggacgaacccagagtttcagtccgaagtgcgagcgcgaattcagggtcaactcgtgagatctctggagaagaagcttttacgcctagcgctgggagtctggcgagtatgaagggtgacgagtggactcagacgctgacgaacgaggtctatcgcgtgatggataacatgggatggcgtccaccgaacgcccaaccaggaccgaacgcgaactctggattccgttcccctcgccgcgaaaacccgaattaggacaagttctgcgagaagtgcggcaagtgggggcgcccagaggaaaactgctggaaagacgtgaagtgtgatcgctgcctggaagtgggtcatccgactcacttgtgtcgcgcgcaaccgtgcgagaactgtggcaaactgcatctcgggaaaccgtgtgaagactggaagacagtggaagctgtgaagaaactcgcccgccaaggtgcactgaaggacatgccgagccaaatcctggataaactcctggatggcgaagcaaactctgggaggccgtcaaaccaataagcccgctgggtggggacccagtacgcgccgggctgaagtaggccccagagttatgtgttctagtgtatgtaggcccggagctgagaacaagaacccaagataaccaacaatgcatgactactttgactcaggatttcatgacttcccctgaaaatcagcatcctgaacaagcgaactctgggtcggtgaactctgaagaaattgtggagtacaagctgaaccctggagagcgctacggatggtgggaaaacaatgatcctgacccaaagaaacgtgatgtggcgatggtgcatggtgctgtgaacgactgccggacgagagttctcctggataccggtgcgactgtgaatattgtgagcttcgacttagcgcgtaagctcggactcacactcaagtcgcacaagcaaaccaaggtgtttggcatgggaagcgttccgacgtacatcggtgccagtgctcaggtgaagattactctcggttcgagggtgatatatctcctggatgtctggattgctaacatcggcgaagggatcgaagttcttctgggtatgagtttcatgtttgcagctggagtgaggatcagtgttcgcgaaggtctcgtgacacttccggatgaagaggcgatcatgatgtgtggatggactccagaggatcgcctggacgtcgacatgcccgtggaaaccacaggtagttggtacctggcccctggggaatccaaggtggtgaagatctcgtatggaccgatgaacccacagcgtgaggttgtgtgggcaggacgaggtgaccgctgggtaacgcaccggatttacgctgcgagatcctggccggtcgccgtgaaggtggtcaatatctcggacaaggacgtctggattcacaacagaacgccagtcgcccgaattgtggagtacggcttcttcccacgtgccggacgctttgtgcgccctggttcgtttgcgtatcgggagtggcagacgcttattctggagagtgttcagtcgcgtgagggcagacttcgggcggaacgcctggctacgcttgagccatcctgtgtcgagaccccagagtatcagtggtctacgaagattctgccgcgacctgcaaagggccccgacgtggcactgcttgcctcggttctcaggaaaccgaagcctcatcgcgtgcgcttcgctgaagacgctgcaactcagactgaaggagtgcctcctgaagaccctcctgaactccgagacgttgctgttgatacgagtgacttgggtgacgttcagaaggaggcggtgaccgatgttgcctcacagactgtcggaaccccagagggcatgagtcctgaaggtgatacggccgctgaaaccctgagtttacaggttgaaattggcagtgattctcagggtcagtggtgcgacgaaggtgattctctgggattcgatgtggatgacgacgattctcagggtgctgttgaagattactgggatatcccgatctcagggatgccgggaactccgttggtgaagctgaagcaggaatatgagcgctgcatgcggctttcgacagaggacctcgactacgagtctgcggtctacatacgtgaaggaagtgagttgctgtctcagttgcgtgaccagttggttatgcttcctgatatgcgtgacttgacccctgagtgcaagatcgaggaggcagatgttggagtccctgggaaaacgacgcccgagatggaagaccaagtgaggcgaattctggaatatcatcggaagatcttcttgggcgacggcaatgcagctcccccacctgcccgtggagtggtttgtgacctggatgttggcgacgctaaacctgttgcccagcgtccaagttccgttgcaccacacctgtggactaaggtgtatgaacttctgaagaagcttctggagaacgggctgatcgagacttctacgtccccctgggcatctccattcgtgatcgtcctcaagaagaatgtcgttgacatccggatgtgcatcgactaccgcgtggtgaatggcttcatcaagctctcgcactacccgctaccgcttattgatgatcttttgattggctttgagtcagcgatgtggtttatgagcttggacatggcgagtggtttctgggctatcaagatggccgagagagccaagttgatctctgtgttagtctgtccctatgggcattaccagtgggtcaggatgccgtttggcctcacgaacgccccgctgatctaccaggcagttctcaataaccgtctgtggggatttctgcggctttcccctgaggaagaagctgaggttgaccaggatgtcttggacgttttggggttgaactctggggaacccagagtttcaggtgaaaatgccctgcggctttcagtgttgacggatgagatgactgtttttcagcgtaacatcccggctccctctcagatgggccctgtcctcggtcgaatctcgtatatcgacgatatcgcccacggtgcgcctacttgggagcagctgtgtcaggatctgaacgcgctgctcttccgactacgttactggaatatctctgtgagtcttcccaagagcgaattcgggaagttgtatattccgtatctctctcacgagattagtgctgagggtatccgagcgacccctaaaatcgcgaagggggttcaagacttgccgttcccgacgacactgaaaggtgtccagagtttcatggggagtttaaattactacaacaagttcattgaagacctacccgtgatcgcggccgtcctgtacgatctgactgaggaacaagtgaaattcaggagagacctgtcgagagcccaggaagcctttgaaatcctgaagcgcaagattgtttcgactccgttgctcagacatactgatcgcttaaggcccttcgtgattattccccacgcaaacccgtgggcagcatctgctgtgttgggccaggagtacgacgggattgtgcacccggttcgattcacaggtcgcgtcctgaatgacgctgagctgcagtatcacattgcggaaaaggaggtgattgctatcctgagagtcctggaggtgtttcgcactttggttgaagccagccctaagatcgtcgtctacacgcgatattctgtgttgaagtggttgctgacctcgcagtcggcagacggtcgaacggtgaagtggggtctgaagttgtcccactggaacctggagatgcgcagagttcaacgggatgatgacggcttggctaggtgcgggtattacccctagagaacacttagatgagatcgctgaaaacctgatcccagccaaggggcgcgttaaacctccagtgcctatcagtatggaaatgctggaagcggactatgaggggtgtattctgagtttcgatggcgccgctaagacttccacgcgacaagggagctgtggctgcattctgtggcatgtccctggttgggaaatcctggatgcccagggattcatcctggaggacgtgactgtgaatgacgctgagtaccatggacttctgatgggcctcactctggcgattgagcgtggaattcaggacatcgttgtggttggggactccaggattgccatccagcaagcccagggtctcatcaactgcaatcagccaaatctccagaggaagctggccgagtatgaagtgctgaagacgaagttcaagtctgtgcggctggtgcatgtcaagcgagagtttaaccaggccgcagactacctgacgtctaagaccctcgcgcttggtgaatcctggaaggtggaggatgctgacgaacgaacacatctgcagttggtgtccaagattcacgagaagttggtaagaccgaaggtgttattgaacgttggaattcaggggagtgattctcagggtgtcgaaactctgggtatccctggacctgagtgcgctccgttgcctgtggcggccaaagtgtttgcagtaatgactcgggcgcgaactcaggagatcgaagcccaaagcgaacccatgggacctctggagtaccaggcggaaagctggcgacgcatcaaagtgcaccagtacaaagatgatcacctgctgcaactcaaggatttcctgaaaggagacacgacgaagctgtcgcacgctcaagccaggaaactcgcgaagatcgctgatgatttcgtgttggattccagagaagtcctgtaccgcttgagtccgtctaccagagatcgaccccgagacatggttgacgaactcagactcgtggtgccgaaagctctgcgaccggatatcctgcattacgctcacgaagattttcagggtgggcaccaggggatcacaaggacgtacgagaagctgcgctctgagttctactggcacggcatgtacgctgatgtggaagttttcgtcaaagagtgtgtggattgcgccagcagcaaggggcgccctaagaatccagggccttcccctgggaacatcgaaccgaggcgcccttttgaagttgtgtctatggatttcgcgacacacttgcctaagtcggaccgtgggaacacgttcctgctgctttatcaggacgcgttctcaggattcgtcatgtgtaaacccatgcgttccaccacggcgcaagatgtcgctgaagtgtacgaagagcaggtcttcaggagattcggcgcgagctcgatgctgaggcacgaccaagtcccaaggttcatgagtgaggtgttcacgcgcttccgtgaacgtttgggtagcaagcagcgagccactctggcgtatcgcccccaggcgaacggacaacaggagcgatcggtgcagactgtcgtgcgcagcattcgagcgtacattgctgaggcggaccagagtgactgggacgaccatgctgagcgcctgatgtttgccctgaatacagcgttcggtgccactcgcctggacactccgttttatctggtgcacggctgggacgcacacggcacggtgtctgcaatgttaggacccaggccatcgagtatccaggagcgcactgcgtacgagtgtcgcaggaagctacagcgtgactatagttatgcacaagcttgcgctgaggatcttcagaagaaggccaagcgcgcgagctctgccgaacaaaccaggaagtggagagagctgtccgaacgactgaaggcaggattcgcagccggtgatgctgtgtggctgtatatacccaaagtgcagcccgggctgagccgcaaactggctcacatgtggcatggccccttcagaattcaggaaatccatgacaacttccgcgtgaaacttagggtcgagaacacaggatatcgcgtgaatccctgggtacacgtgagccgtttgaaacccagagcactattcccgaagcggcccactgtggagatcgacgtggacgagaatgatgaccttgatgcggcgctgttgcctgaagacagttgggagcccgacgctgcgaacgacgagtatgaagtggagcgaatcctggatttgcgatggattaagcgaactcggacagcgagacgaattcgtgagtactttgtgaagtggaagggatatgacgagactgagtggctacctgtgtcgaagctcaactgtggtgccctgctctacgaattcaatcaaggcgcaagagcgcgagcccgtttccaggccatgcaggctggagatgatcacccatgagtctagaactctggggtgacactgacccagagttacatgtgatactcaggggaaaccccgagtgacactgtgatactctggggaaaatcgacgggatgtgtgaatattggagacggaaaacgtgaatgtgatttgatttgatttgattatggagaaggagacgcgcttggtcgcgcccgtcttggtgctgcccgtcgaagtgtcgccggacgctgagttacccgcctggccgctgccgccgcctgctggtgcggtgctcgcaggggcgtcgccggtgcgctgctgtgtcggaggtggcgtgctgccggggggcgccgtgccttgagctggcgccgtcgcttgcttgccgtccgaagtcgcgctctccgccatgttgacgatctgcgaaatggctatgtgaccgcgcattgcccgttggagttttgcgtttgagaggagaaccttgaagataggtcctgaccaaccgttggggagacagggtgccgccaaagcgagtgaaaccctgggagtcgacagagtgcaacggccgtatcgaagttgacggtggatggacctgtgtgtttttgtggcctggccatggttcaccagttcggagcgatttcctctttgatggacccggaccaggaggggcggttgacacgaggcggtccccagaaaattgccgacgatgtgccgtcacctctgtgacctggagtttgtatcggatgctgattggtggatgactgggatacggcgcggctgtacccgtgtgacatggatggcgactgtgggagagaagtgatttttcgggatgaatccagcgtctgaccgcagatgggcccaactggctggaagtgtgaatcctgggagtgcacgcccagaatttcagagagcactcagtccagccgcggactttcccttacgatgagtgcctaaagtctggcggaaagtgtctctggagaatgtatcccagagtacacctcatcttgctgtggctcagagtgccccagaggatcaaattaccctgagaatcaacccactactaccatgatcatgcgcaggaggccgctaaacccactaaaagtgtggttttgaggagatacacacgagtctgcactgcagcagacttgttacccagagtgccgcacggaaacctagagtgccgcacgatgacccagagttcacctccctgagtgcaggtgacccagagttccaaagatgattctctgggtttggaccataaatccagactctctatactgaacttaactgtttcccgagccaacacccaagaatccccacagttccccaagattcctcagaattcccaggatttcagaagatgaccctgagtgtcacctggttttcagggattcgagtcagttcgaagccagtctgcaatcaaatgatgcgtgaccttgaagaaccgtcatggatgcacagactggatactttcgaggagtcgagagggagtcctgcaccatactaaaccaagtctaaggacccacaattggcactttcgacgccgtgcgacaatggattcgcaagccgatcgcaagtttggaccgctgatcccaaggtatactcaagacaagacattttgaccccaagcatagtgaacagaagatatttgcccgaagaagagagagagagagagagagagagaagtagctgataaaaaccaaacagagttccttttaccctgtactgcgcaagtgacttcggccaagcctgccgacggaaatccggaggacccgagactacgaccgcgggacgctaagggcacatcaacagcgaaggacagccgtcagtgtgggctccatcaaactcaagtccagttaggtggtgaccagcgacggccttgagcttcctggggtgatccatctattccatatcctagttgggtcacttgctgtgctcgtggtagcccatttcatattattccagagggtattctggggtgctaggtagtcgcctccaggattttgtattgactgcttgtgtgaagggaaggtaactgatagtgattgtattttcctcctttattggaggtggtgcgcgtttgtgtgagtctcaggggagctaggcccctgaatttcagactcgagtgagcctagtgtgtgtgtgacccaccgtccaagggtccaaaagaataagtgacggctagttgtagtgtttgtatactctgtatttgttggttttatcgagctaggagggcatttgggtaaggtgtcttctgagttccaagtcccagagttgactgaaatcctggaccctgaattcgtgatattctgggtttcaggggatctgattctctgggtttgccttttggtgtggaggtgcgttctgaagtagacgtgcgctcccgcactgcttcgaggctatattttcaaccggtggagtgccgttccgtcgaagacaaacgagccgacagggattacacaaggtacccacgccaaccaaggagtgtgattctcagggtttaaagctttgcggctgcgaatctctgggtctatcttcttgctgttgactctcaagtcgattctctgggtctgcccctggggaacagtcttgggctgtgctatacgaacccccctgggcgacaaaggtttcatcggcctcgcctcactcgtgttacgatacctagactccacagcgatggctgaagcggtagtcaagtatttccaggccaaaacccctcgaagcggtggtaggtgtaggccctaagacgtagggcactcgctttcacacgcgcgggcagccgctgagcacgggttccccctctcgctcaaggagaaagaacggttggtggggtggataatcagtccacgagccgacaatgggtcgttcacgttgaagccgcagacgttagaggtataccgtgcctgtgggaccgctcagggtcgttcaaaacaaaatctagaaactggcgtaagtacattctgcgccgtcacgggcacggacgaattggggaggcgcccgctactcctgctgacgcagggtaccttgtagtttactgcagcgagatggtgggggtgacggtgtaatacatggcatcaatgttgtttgcaacgcggaccaaacgtgcttaggtggcgctgtaggaatacacattcaagtttggggctctaccacgccaagtgtggcgaggcagtgggacggcttccccctgacgtagaatagacttgtccaaacgtcgaatcaccaagtccagacccgaactcgtaaaggtctagattctccaagtcacagccgaaagaattcggctagactgcaatgaagactccgctgacgctccttgaacttggacttgaaccgggtgaggcgtgtgggtactgcccttgtgttcccttaaataactatccatagcgctaagctttgggcccagacggaagacaaccacagcaacttcgcgtcgagttcagatgtttcccagtgtcaccaaacggagcttgctccccacatcacaggatccagtctgcacgcatcgtagcccaatctactccgggattccttcaatgtagacacggcactccacacctactctgtactcttctttctagacattggaccaggtcttgacggcttcttcacttcctttggcggtactagctgaggtcgcacaaccccgtctccctcgatcctcgacctagcgtagccccacgatttggcttgacttgagcctggtttgagagccgctccctgagtgtcggttcgacgggtaacaatccgtacatgcccaaaagccgaaaccgtctatatggggccttgaacgtcactggagactctccatgacacctgtgatgacacaaaatccaaacacgtgcgtctttcggggcaaagttgactctgatttcaatcctactcatgcaaccatgaacctatcaagtggaggtgcaaatcgcccttcggaaacactaaaacaacatcgagaaggccgacttgcgagctaccagctcgcgctttcgggtgcggcgcttcaatataagctgagagatgattgagcataagtcggatgggaccggcgctgggaataatcactgccagcaacacagataccgcgcttgtgaatggctacagagggcatgtcatctgggcgcaacggggctagcaacagcgaaccgatgcaagcacaacttcaatagtactgcgagcctccgaagctccgctggacctcgaactcaacgtggtcaacgacttccgccaaatccagtcaagttcagcaaagtccagcaagatcatgttgaaactcgtcggagttcagataagacttcttcgttgagccatcaaggtcttagccgacgcatatccggatcttcgggagtttggggacgatccagcaggagctcctcgttctcagaacttgggccagactcagtggcacaggaatctattgcagtcgttggatctcgcatagaccaaccaacacgcactcaatcctgttctaaggcagccccaatgaccggcacaagcggacgggacgtgaaccaatcccgatagcacattgttgatgcatccgaatttcggtcgacagccgtgaccgtatatcaaagcctccgcggcctccacacttcacctctggacttggcggccattggccaacagtaagtacagtccagcttctatcgtagccaccacccacgtgtttgcccgacttgggttttgcagattctatagacttgagactccaccaggttcgctggacacaccctccctgatattggattactgttcctgaaccaagcacgtcggaggcaatccacatacgcggtttgccaaaatctaagcgggctttgtcacacaagctagtgccgggtgacacatccacttacaacgtaagcttctgcgcgtggtttcacacatgcacacagagctaggatattcccagattacagtttggcctcccggtggcaggcccgaatctgaatctattatcaccgaaatataccgaattttacttcattacataacacgcaactcacgaactcatgtcgattcccactgcggctgccatagaactagcgcaccccttcgattccgttacattgcaatcaaaatgcgggatttacacatccgtgtataagtcgttattgatctactcagcaccggactcgttaatatacagctcgtgatagtttaatactcatggtccaagttcttaataacagttgtacgtacgttgagtgtgttatgcatcggtttcataccccgatcggcctcctcaccgcgttgcctcatttttttaaagcacctagaaatgcacaaaaacgtagaataaaaataatcagtgctgttcatttagggcagagaagtttgaacggcaccaccacgtcaaaaacagttagtttcttcacactcgaactggagtccgtattgtcgttcgtgacaatagcaatttgtggcaatcacacgtacctatgtaacttgcaaaggaattaagccttcaacgtccttaattcgattgcaagcagtactgtgtgcagcgtcttgtgtatttgcttggattgcgacaatacctgtataagaaaaaaagagagcctattatcagtcagtatcgtcggaatgaaagtttaactgtcgtctatcctaaaaaaaaatcctgatacgcaccattataccggtaagtaacaccttgatctacggtgacaaccgatacataccggttatgcacgtaccttaagttgtatcctttgatgcagcacgacactgactccaatcaggaccaacactccgcttgtagccatagtcgaaaaccagctcctcaccaatagcaatatcgcgcagtgcccaaatacttatgtggtgcacaccacatacgcttacaaccttggccgtgcagttgggagcgtcaccatcgtgatttatgaacttgcttttgtttccgttgcggagtgcatccagtactgcgtcttcgttcagatcgaacaggtagctcatttccatcttgtcataaatgagcccacgtcgctcagcctcgtcctgtgacagcattgcgcctgtgtactcgtacacaaactggttcgccgtgattgcctcttgagcgtacatgccgtatccgtgaattgaagaaaagctcatgcccaagcgtttatgcttgttgcggatcacattcacgttgctgcatgttgacttgctattcgccaaagcatcattcgcaatgtcgatagccagctcacacgctccgcaggacacgcaaacgtctgggtcacactcgcggagtgcggcaaaacatgggcacttgtttgtctggcactcgccatgagaacatgtacagccttcgaacctgcattaatcattgcaacaggtcacgcattaggttagttgtgagcgccctccgccaagtacgcacgacttggctcaaccgataggagctcgataccagcgacaacttcacgcatcacccacctattcggacagtcacgagagcaggcgcacgccttctcgcacatatggtcgcgcttcatgcacgagcacccagttgagtcgcacattccgtcgtgcatgcacggcttgtactcatggttctctgtgcctcggtcctggagacgctggttgcgagtcctctgcagcaactcatggttgctcccacctgatctgcggccttgcttccagctacgcatacggcgacccgaccttccatccgccatcgggcgctggtcattcgctttgtcatttctgatcagctcgtgcagatcagtgcaggaggccgagccgacgacggccgccagcaagcacgagttgtcgcccattgtttcacgtagtttccgcaccacacccagctcggctgctgacaacgatgctcgcttgttgctggtaacgcgatcatcattcttccagcacagcttgctacaggcactgcccttggagaggaacaatcgcattttcgttgtaaccatcggcacgtgcgaatcattgacgaactccgatgggtcagcgagtactctccgctgttgtttcgcgttcatatgtccatcactcccgatgacgctagcactcttcttcgaggcagaattcatcgcggaagatccgcattgcgcattgccgcgcatatctgccgcacttgcgagcttcacctcgccgttcagctccgtgcccaaacaaacaacttcatcctctgacaaatccaacagatccacttcgtccacgtttccaatgccctgaacactaggagctgcagaccaaagccgagggtacacaggatctacacgcctggctggtagtgggtggtcaccgccgtgttcgtgacaagcgtatctgtagcacatccggcagaaggagccgcaatacacgtccaccagttcggcatagctgtccgtcgttcgtaagcccagcgctgccatacccgccactgcttcatccaacacgctgtccacaaagctagaaacgaggcttcggatcggcggctgcaatcggcggctcaaaacttttctgcgggttctctttgacagtgatgactgctccatcaacttcacaatggctgcaacatcggggtccgcaacctgcgctccatcatgacttagttcctctatgcgttcgatcctggcttccgctcgctgccgcgaatcgtgcagtttcttcagctcacagtaagcagtgtacgcctgcgaaaagtccagctcagtctttagcgcctggaacacctgttcggagtcgccaagacaacccaccaccagtcgtaacacgaattcagctacctcttcgtcagccacattcccaattttcagggcgtacttcttcgcggcgtcatcaccgccactcccgctgtttggtcgtgtaatagctgtgtaacgcaggataggatcgtcgtcaacgcgatagtttgcgcggagtccaatgctggtcgtgtatcttcgcaatggctgaacctcttcgacccggttgatctggatcagcgatgagatggttttctcgcgcacaaatccatcaccatggccgatccgaaaagaaacactcccagcatccatgctacaagagcgatgcgtgattttaagtttcctcacagcgtgcttttccgcggcactgcgaggcagtacacgcggcatcactacatcgaaacagtacggtgagtaagtcagtgtagtcatagttgtaatacaatgcaagcaatgcgtaccgttttgctggcaaagaactcgtctattcttctgcagtgcatcctgatacgcgaaaattttctgacgagcttctgccaaaattgcttgcacctttcgtttatgacagctgcggatgacaggaaggtgcgcagacactaaggcgcccactgcacgagtaacgtcactctgaggcttggccacctcgctagggaacacagacgaaatgcactgtgtcgacttgccgaagttctctagaattgcgcactgagatgccagcgtgtcggtttggtctgcattgatcatggcaatagcacaataggttaatacgccagaagtgagagtcgtatacagcatgctaacaacagattggggtcaaacagcagcagtaccataccataatacgtgagcggatggtcgtatcttgtatcaaacgaaatgctgcgcaacgggaggatatttaacggagcctcgcgcaggtaaacacctcggtatgacgtcgggtgaagcaatgcacgagagggcgcgttggcggtgagtagtttggcagcgacggaaggatttacatggacgtcagctccac
